United States Patent Application Publication US 2026/0240958 A1 - sequence listing, part 21

SEQ ID NO: 18496 - RNA, 9485 nt, synthetic construct
  source 1..9485: mol_type = other RNA
aggaaataagagagaaaagaagagtaagaagaaatataagagccaccatggcccctaagaagaagcgtaaagtgagccggatggaacgcctcgtctacgaggtgcggcagaagtgcagaaacatcgaggacatctgcatctcctgcggatctctgaacgtgaccctggagcacccactgttcatcggcggcatgtgccagaactgtaaaaactgttttctggagtgtgcctatcaatacgacgatgacggctaccagagctactgcaccatctgttgcggcggaagagaggtgctgatgtgtggaaataacaactgctgccggtgcttctgcgtggaatgcgtggacctgctggtgggccccggcgccgcccaggccgctattaaggaagatccttggaactgctacatgtgcggccacaagggcacatacggcctgctgagacggagagaggactggcctagcagactgcagatgttcttcgccaataaccacgaccaggagttcgacccccctaaggtgtaccctcccgtccccgccgagaagagaaagcccatccgggtcctgagcctgttcgatggcatcgccaccggtctgctggtgctgaaggacctgggcatccaggtggataggtacattgcctccgaggtgtgcgaggactccatcaccgtgggaatggtgcgtcatcagggcaagatcatgtacgtgggcgacgtgcggagcgtgacacagaagcatatccaggagtggggccctttcgacctggtgatcggcggcagcccttgcaatgacctgagcatcgtgaacccagcccggaagggcctgtacgagggaaccggcagactgttcttcgagttttacagactgctgcacgacgcccggcctaaggaaggcgacgaccggcccttcttttggctgttcgagaatgtggtggccatgggagtcagcgacaagcgggatattagccggttcctggagagcaaccccgtgatgatcgatgccaaggaagtgagcgccgcccaccgggccagatacttctggggcaatctgcctggcatgaacagacccctggccagcaccgtgaacgacaagctggagctgcaggagtgcctggagcacggccggatcgccaagttcagcaaggtgagaaccatcaccacccgaagcaacagcatcaaacaaggcaaggaccagcactttcctgtgttcatgaacgagaaggaggacatcctgtggtgtaccgagatggagagagtgttcgggttcccagtccactacacagatgtcagcaacatgtctagactggccagacagagactgctgggaagaagctggtccgtccctgtgatcagacacctgttcgcccctctgaaggagtacttcgcctgcgtgagcagcggcaacagcaacgccaacagccggggccccagcttctctagcggcctggtgccactgtccctgagagggagccacatgggccccatggagatctacaaaaccgtgagcgcctggaagcggcagcctgtgcgcgtgctgagcctgtttcggaatatcgataaagtcctgaaaagcctgggattcctggagagcggctctggctccggcggtggcaccctgaagtacgtggaggatgtgacaaacgtggtcagacgggatgtggagaagtggggccccttcgatctggtgtacggcagcacccaacccctgggcagctcttgtgaccggtgccctggctggtacatgtttcagttccaccggatcctgcagtacgccctgccgagacaggagtcccagcggccattcttttggattttcatggacaacttgctgctgaccgaggatgaccaggaaactaccactcggttcctgcagaccgaagccgtgaccctgcaggacgtgagaggccgggactaccagaacgccatgcgggtgtggtccaacatccctggactgaaaagcaagcacgcacctctgacccctaaagaagaggagtacctgcaggcccaggtgcggagcagaagcaagctggacgcccctaaggtggatctgctggtgaagaattgcctcctgcccctgagagagtacttcaagtatttcagccagaatagtctgcccctgggaggcagcggcggcggcgccctggtgacatttgaggacgtcgccgtgcggttcacccaggaggaatgggctctgctggatccttctcagaaaatcctgtaccgggacgtgatgagagagacataccggaatctgacctccgtgggcatcaactgggaatgttgggaccttgaagcctgcttcagaagcctgggaagaaacctgagagtgcaggtggtgaagagaaagtgcgagctgaccaacagcggcccctgcgccgagggcggcccaagcagcggcgcccctcctcccagcggcggcagcccagccggctccccaacctctaccgaggagggcacctctgagtccgccacccccgagagcggccctggcacctccaccgagcccagcgagggcagcgcacccggcagccctgccggcagccccacctccacagaggagggaaccagcaccgagcccagcgaaggcagcgccccaggcaccagcaccgagcctagtgagcaggagattaaacggatcaacaagatcagaagaagacttgtgaaagacagcaacaccaagaaggccggcaagacaggccccatgaaaaccctgctggttagagtgatgacacccgatctgagagagcggctggaaaacctgagaaagaagcctgaaaatatcccccagcccatcagcaatacatctagagccaacctgaataagctgctgaccgattacaccgaaatgaagaaggcgatcctgcatgtgtactgggaagagttccagaaggaccctgtgggcctgatgagccgggtggcccagcctgccagcaagaagatcgatcagaacaagctgaaacctgagatggacgagaagggcaacctgaccaccgccggctttgcctgctctcagtgtggccagcccctgttcgtgtacaagctggagcaggtgtctgagaagggcaaggcttacaccaactacttcggacggtgcaatgtggccgagcacgaaaagctgatcctgctggcccagctgaagcccgagaaggatagcgacgaagccgtgacatatagcctgggaaagtttgggcagagggccctggatttctacagcattcatgtgaccaaggagtccacccaccccgtgaagcccctggcccagatcgccggaaacagatacgcctccggacctgtgggaaaggccctgagcgacgcatgtatgggcacaatcgcctccttcctgtctaagtaccaggacatcatcatcgaacaccagaaggtggtgaagggcaaccagaagagactggagagcctgcgggagctggccggcaaggaaaacctggaataccctagcgtgaccctgccacctcagcctcacaccaaggagggcgttgatgcctacaacgaagtgatcgcccgggtgcgaatgtgggtgaacctgaacctgtggcagaagctgaagctaagcagagatgatgccaagcctctgctgagactgaagggattcccttcctttcctctggtcgagagacaggccaacgaagtggactggtgggacatggtgtgtaacgtgaagaagctgatcaacgagaaaaaggaggatggcaaggtgttttggcagaatctggctggctacaagagacaggaagccctgagaccatacctgagcagcgaggaagatcggaagaagggaaagaaattcgctcggtaccagctgggcgacctgctgctgcacctggaaaagaagcacggcgaggactggggaaaggtgtacgacgaggcctgggagcggattgacaagaaagtggaaggcctgagcaagcacatcaagctggaagaggaacggagaagcgaggacgcccagagcaaggccgccctgaccgactggctgcgggctaaggccagcttcgtgatcgagggcctgaaggaggccgacaaggacgagttctgcagatgcgagctgaagctgcagaagtggtacggggacctgcggggaaagcccttcgccatcgaagccgagaacagcatcctggacatcagcggcttcagcaagcagtacaactgtgccttcatctggcagaaggacggcgtgaagaagctgaacctgtacctgatcatcaactacttcaagggcggcaagctgcggttcaagaagatcaaacctgaagccttcgaagccaacagattctacaccgtgatcaacaaaaagagcggcgagatcgtgcccatggaggtgaacttcaacttcgacgaccccaacctgatcatcctgcctctggcctttggcaagagacagggcagagaattcatctggaacgacctgctgtccctggaaaccggcagcctgaagctggccaacggaagagtgatcgagaagacactgtacaacagaagaacccggcaggatgagcctgccctgttcgtggccctgaccttcgagcggcgggaggtcctggactcctccaatatcaaaccaatgaacctgatcggcgtggcaagaggcgaaaacatccccgccgtgatcgccctgaccgaccccgagggctgcccactgagccggtttaaggatagcctgggaaacccaacccacatcctgagaatcggcgagagctataaggagaagcagcggaccatccaggccaagaaggaggtggagcagcggagagccggcggctacagccggaagtacgccagcaaagccaagaatctggcagacgatatggtgagaaacaccgctagagatctgctgtactacgccgtgacccaggatgccatgctgatcttcgccaacctgagccggggcttcggccggcagggcaagcggaccttcatggccgagagacagtacacacggatggaggactggctgaccgccaagctggcctacgagggcctgagcaagacctacctgtccaagacactggcccagtacacctccaagacatgcagcaactgtgggtttaccatcaccagcgccgactacgacagggtgctggagaagctgaagaagacagcaacaggctggatgaccacaattaacggcaaggagctgaaggtggagggccagattacctactacaacagatacaagagacagaacgtagtcaaggacctgtccgtcgagctggatagactgagcgaagaatctgtgaacaacgacatctcctcctggacaaagggcagaagcggagaagctctgagcctcctgaagaaaagattctcccatagacccgtgcaggagaagttcgtgtgcctgaactgcggcttcgagacacacgcagccgagcaagccgccctgaacatcgccagatcctggctgttcctgcggagccaggagtacaagaaataccagacaaacaagacaaccggcaacaccgataagagagccttcgtcgagacctggcagtccttttaccggaagaagcttaaggaggtgtggaaacctgccgtgcggtctggcggatctggcggaggctccgccctggtgacatttgaggacgtcgccgtgcggttcacccaggaggaatgggctctgctggatccttctcagaaaatcctgtaccgggacgtgatgagagagacataccggaatctgacctccgtgggcatcaactgggaatgttgggaccttgaagcctgcttcagaagcctgggaagaaacctgagagtgcaggtggtgaagagaaagtgcgagctgaccaacagcggcccctgcgccgagggcggcccaagcagcggcgcccctcctcccagcggcggcagcccagccggctccccaacctctaccgaggagggcacctctgagtccgccacccccgagagcggccctggcacctccaccgagcccagcgagggcagcgcacccggcagccctgccggcagccccacctccacagaggagggaaccagcaccgagcccagcgaaggcagcgccccaggcaccagcaccgagcctagtgagcaggagattaaacggatcaacaagatcagaagaagacttgtgaaagacagcaacaccaagaaggccggcaagacaggccccatgaaaaccctgctggttagagtgatgacacccgatctgagagagcggctggaaaacctgagaaagaagcctgaaaatatcccccagcccatcagcaatacatctagagccaacctgaataagctgctgaccgattacaccgaaatgaagaaggcgatcctgcatgtgtactgggaagagttccagaaggaccctgtgggcctgatgagccgggtggcccagcctgccagcaagaagatcgatcagaacaagctgaaacctgagatggacgagaagggcaacctgaccaccgccggctttgcctgctctcagtgtggccagcccctgttcgtgtacaagctggagcaggtgtctgagaagggcaaggcttacaccaactacttcggacggtgcaatgtggccgagcacgaaaagctgatcctgctggcccagctgaagcccgagaaggatagcgacgaagccgtgacatatagcctgggaaagtttgggcagagggccctggatttctacagcattcatgtgaccaaggagtccacccaccccgtgaagcccctggcccagatcgccggaaacagatacgcctccggacctgtgggaaaggccctgagcgacgcatgtatgggcacaatcgcctccttcctgtctaagtaccaggacatcatcatcgaacaccagaaggtggtgaagggcaaccagaagagactggagagcctgcgggagctggccggcaaggaaaacctggaataccctagcgtgaccctgccacctcagcctcacaccaaggagggcgttgatgcctacaacgaagtgatcgcccgggtgcgaatgtgggtgaacctgaacctgtggcagaagctgaagctaagcagagatgatgccaagcctctgctgagactgaagggattcccttcctttcctctggtcgagagacaggccaacgaagtggactggtgggacatggtgtgtaacgtgaagaagctgatcaacgagaaaaaggaggatggcaaggtgttttggcagaatctggctggctacaagagacaggaagccctgagaccatacctgagcagcgaggaagatcggaagaagggaaagaaattcgctcggtaccagctgggcgacctgctgctgcacctggaaaagaagcacggcgaggactggggaaaggtgtacgacgaggcctgggagcggattgacaagaaagtggaaggcctgagcaagcacatcaagctggaagaggaacggagaagcgaggacgcccagagcaaggccgccctgaccgactggctgcgggctaaggccagcttcgtgatcgagggcctgaaggaggccgacaaggacgagttctgcagatgcgagctgaagctgcagaagtggtacggggacctgcggggaaagcccttcgccatcgaagccgagaacagcatcctggacatcagcggcttcagcaagcagtacaactgtgccttcatctggcagaaggacggcgtgaagaagctgaacctgtacctgatcatcaactacttcaagggcggcaagctgcggttcaagaagatcaaacctgaagccttcgaagccaacagattctacaccgtgatcaacaaaaagagcggcgagatcgtgcccatggaggtgaacttcaacttcgacgaccccaacctgatcatcctgcctctggcctttggcaagagacagggcagagaattcatctggaacgacctgctgtccctggaaaccggcagcctgaagctggccaacggaagagtgatcgagaagacactgtacaacagaagaacccggcaggatgagcctgccctgttcgtggccctgaccttcgagcggcgggaggtcctggactcctccaatatcaaaccaatgaacctgatcggcgtggcaagaggcgaaaacatccccgccgtgatcgccctgaccgaccccgagggctgcccactgagccggtttaaggatagcctgggaaacccaacccacatcctgagaatcggcgagagctataaggagaagcagcggaccatccaggccaagaaggaggtggagcagcggagagccggcggctacagccggaagtacgccagcaaagccaagaatctggcagacgatatggtgagaaacaccgctagagatctgctgtactacgccgtgacccaggatgccatgctgatcttcgccaacctgagccggggcttcggccggcagggcaagcggaccttcatggccgagagacagtacacacggatggaggactggctgaccgccaagctggcctacgagggcctgagcaagacctacctgtccaagacactggcccagtacacctccaagacatgcagcaactgtgggtttaccatcaccagcgccgactacgacagggtgctggagaagctgaagaagacagcaacaggctggatgaccacaattaacggcaaggagctgaaggtggagggccagattacctactacaacagatacaagagacagaacgtagtcaaggacctgtccgtcgagctggatagactgagcgaagaatctgtgaacaacgacatctcctcctggacaaagggcagaagcggagaagctctgagcctcctgaagaaaagattctcccatagacccgtgcaggagaagttcgtgtgcctgaactgcggcttcgagacacacgcagccgagcaagccgccctgaacatcgccagatcctggctgttcctgcggagccaggagtacaagaaataccagacaaacaagacaaccggcaacaccgataagagagccttcgtcgagacctggcagtccttttaccggaagaagcttaaggaggtgtggaaacctgccgtgcggtctggcggatctggcggaggctccttctaaagcccctatcacattcggcgacctggccatctacttcagccaggaggaatgggagtggctgagccccatccagaaggacctgtacgaggacgtgatgctggaaaactacagaaatctggtgtccctgggcctcagctttagacgccccaacgtgatcaccctgctggaaaagggcaaggccccatggatggtcgagcctgctagacggcggagaggacctgatagcggcagcaaggtgggatctggctccggcagcggccccaagaaaaagagaaaagtctaagctgccttctgcggggcttgccttctggccatgcccttcttctctcccttgcacctgtacctcttggtctttgaataaagcctgagtaggaaggctagcaaaaaaaaaaaaaaaaaaaaaaaaaaaaaaaaaaaaaaaaaaaaaaaaaaaaaaaaaaaaaaaaaaaaaaaaaaaaaaaa

SEQ ID NO: 18497 - RNA, 9485 nt, synthetic construct
  source 1..9485: mol_type = other RNA
aggaaataagagagaaaagaagagtaagaagaaatataagagccaccatggcccctaagaagaagcgtaaagtgagccggatggaacgcctcgtctacgaggtgcggcagaagtgcagaaacatcgaggacatctgcatctcctgcggatctctgaacgtgaccctggagcacccactgttcatcggcggcatgtgccagaactgtaaaaactgttttctggagtgtgcctatcaatacgacgatgacggctaccagagctactgcaccatctgttgcggcggaagagaggtgctgatgtgtggaaataacaactgctgccggtgcttctgcgtggaatgcgtggacctgctggtgggccccggcgccgcccaggccgctattaaggaagatccttggaactgctacatgtgcggccacaagggcacatacggcctgctgagacggagagaggactggcctagcagactgcagatgttcttcgccaataaccacgaccaggagttcgacccccctaaggtgtaccctcccgtccccgccgagaagagaaagcccatccgggtcctgagcctgttcgatggcatcgccaccggtctgctggtgctgaaggacctgggcatccaggtggataggtacattgcctccgaggtgtgcgaggactccatcaccgtgggaatggtgcgtcatcagggcaagatcatgtacgtgggcgacgtgcggagcgtgacacagaagcatatccaggagtggggccctttcgacctggtgatcggcggcagcccttgcaatgacctgagcatcgtgaacccagcccggaagggcctgtacgagggaaccggcagactgttcttcgagttttacagactgctgcacgacgcccggcctaaggaaggcgacgaccggcccttcttttggctgttcgagaatgtggtggccatgggagtcagcgacaagcgggatattagccggttcctggagagcaaccccgtgatgatcgatgccaaggaagtgagcgccgcccaccgggccagatacttctggggcaatctgcctggcatgaacagacccctggccagcaccgtgaacgacaagctggagctgcaggagtgcctggagcacggccggatcgccaagttcagcaaggtgagaaccatcaccacccgaagcaacagcatcaaacaaggcaaggaccagcactttcctgtgttcatgaacgagaaggaggacatcctgtggtgtaccgagatggagagagtgttcgggttcccagtccactacacagatgtcagcaacatgtctagactggccagacagagactgctgggaagaagctggtccgtccctgtgatcagacacctgttcgcccctctgaaggagtacttcgcctgcgtgagcagcggcaacagcaacgccaacagccggggccccagcttctctagcggcctggtgccactgtccctgagagggagccacatgggccccatggagatctacaaaaccgtgagcgcctggaagcggcagcctgtgcgcgtgctgagcctgtttcggaatatcgataaagtcctgaaaagcctgggattcctggagagcggctctggctccggcggtggcaccctgaagtacgtggaggatgtgacaaacgtggtcagacgggatgtggagaagtggggccccttcgatctggtgtacggcagcacccaacccctgggcagctcttgtgaccggtgccctggctggtacatgtttcagttccaccggatcctgcagtacgccctgccgagacaggagtcccagcggccattcttttggattttcatggacaacttgctgctgaccgaggatgaccaggaaactaccactcggttcctgcagaccgaagccgtgaccctgcaggacgtgagaggccgggactaccagaacgccatgcgggtgtggtccaacatccctggactgaaaagcaagcacgcacctctgacccctaaagaagaggagtacctgcaggcccaggtgcggagcagaagcaagctggacgcccctaaggtggatctgctggtgaagaattgcctcctgcccctgagagagtacttcaagtatttcagccagaatagtctgcccctgggaggcagcggcggcggcgccctggtgacatttgaggacgtcgccgtgcggttcacccaggaggaatgggctctgctggatccttctcagaaaatcctgtaccgggacgtgatgagagagacataccggaatctgacctccgtgggcatcaactgggaatgttgggaccttgaagcctgcttcagaagcctgggaagaaacctgagagtgcaggtggtgaagagaaagtgcgagctgaccaacagcggcccctgcgccgagggcggcccaagcagcggcgcccctcctcccagcggcggcagcccagccggctccccaacctctaccgaggagggcacctctgagtccgccacccccgagagcggccctggcacctccaccgagcccagcgagggcagcgcacccggcagccctgccggcagccccacctccacagaggagggaaccagcaccgagcccagcgaaggcagcgccccaggcaccagcaccgagcctagtgagcaggagattaaacggatcaacaagatcagaagaagacttgtgaaagacagcaacaccaagaaggccggcaagacaggccccatgaaaaccctgctggttagagtgatgacacccgatctgagagagcggctggaaaacctgagaaagaagcctgaaaatatcccccagcccatcagcaatacatctagagccaacctgaataagctgctgaccgattacaccgaaatgaagaaggcgatcctgcatgtgtactgggaagagttccagaaggaccctgtgggcctgatgagccgggtggcccagcctgccagcaagaagatcgatcagaacaagctgaaacctgagatggacgagaagggcaacctgaccaccgccggctttgcctgctctcagtgtggccagcccctgttcgtgtacaagctggagcaggtgtctgagaagggcaaggcttacaccaactacttcggacggtgcaatgtggccgagcacgaaaagctgatcctgctggcccagctgaagcccgagaaggatagcgacgaagccgtgacatatagcctgggaaagtttgggcagagggccctggatttctacagcattcatgtgaccaaggagtccacccaccccgtgaagcccctggcccagatcgccggaaacagatacgcctccggacctgtgggaaaggccctgagcgacgcatgtatgggcacaatcgcctccttcctgtctaagtaccaggacatcatcatcgaacaccagaaggtggtgaagggcaaccagaagagactggagagcctgcgggagctggccggcaaggaaaacctggaataccctagcgtgaccctgccacctcagcctcacaccaaggagggcgttgatgcctacaacgaagtgatcgcccgggtgcgaatgtgggtgaacctgaacctgtggcagaagctgaagctaagcagagatgatgccaagcctctgctgagactgaagggattcccttcctttcctctggtcgagagacaggccaacgaagtggactggtgggacatggtgtgtaacgtgaagaagctgatcaacgagaaaaaggaggatggcaaggtgttttggcagaatctggctggctacaagagacaggaagccctgagaccatacctgagcagcgaggaagatcggaagaagggaaagaaattcgctcggtaccagctgggcgacctgctgctgcacctggaaaagaagcacggcgaggactggggaaaggtgtacgacgaggcctgggagcggattgacaagaaagtggaaggcctgagcaagcacatcaagctggaagaggaacggagaagcgaggacgcccagagcaaggccgccctgaccgactggctgcgggctaaggccagcttcgtgatcgagggcctgaaggaggccgacaaggacgagttctgcagatgcgagctgaagctgcagaagtggtacggggacctgcggggaaagcccttcgccatcgaagccgagaacagcatcctggacatcagcggcttcagcaagcagtacaactgtgccttcatctggcagaaggacggcgtgaagaagctgaacctgtacctgatcatcaactacttcaagggcggcaagctgcggttcaagaagatcaaacctgaagccttcgaagccaacagattctacaccgtgatcaacaaaaagagcggcgagatcgtgcccatggaggtgaacttcaacttcgacgaccccaacctgatcatcctgcctctggcctttggcaagagacagggcagagaattcatctggaacgacctgctgtccctggaaaccggcagcctgaagctggccaacggaagagtgatcgagaagacactgtacaacagaagaacccggcaggatgagcctgccctgttcgtggccctgaccttcgagcggcgggaggtcctggactcctccaatatcaaaccaatgaacctgatcggcgtggcaagaggcgaaaacatccccgccgtgatcgccctgaccgaccccgagggctgcccactgagccggtttaaggatagcctgggaaacccaacccacatcctgagaatcggcgagagctataaggagaagcagcggaccatccaggccaagaaggaggtggagcagcggagagccggcggctacagccggaagtacgccagcaaagccaagaatctggcagacgatatggtgagaaacaccgctagagatctgctgtactacgccgtgacccaggatgccatgctgatcttcgccaacctgagccggggcttcggccggcagggcaagcggaccttcatggccgagagacagtacacacggatggaggactggctgaccgccaagctggcctacgagggcctgagcaagacctacctgtccaagacactggcccagtacacctccaagacatgcagcaactgtgggtttaccatcaccagcgccgactacgacagggtgctggagaagctgaagaagacagcaacaggctggatgaccacaattaacggcaaggagctgaaggtggagggccagattacctactacaacagatacaagagacagaacgtagtcaaggacctgtccgtcgagctggatagactgagcgaagaatctgtgaacaacgacatctcctcctggacaaagggcagaagcggagaagctctgagcctcctgaagaaaagattctcccatagacccgtgcaggagaagttcgtgtgcctgaactgcggcttcgagacacacgcagccgagcaagccgccctgaacatcgccagatcctggctgttcctgcggagccaggagtacaagaaataccagacaaacaagacaaccggcaacaccgataagagagccttcgtcgagacctggcagtccttttaccggaagaagcttaaggaggtgtggaaacctgccgtgcggtctggcggatctggcggaggctccgccctggtgacatttgaggacgtcgccgtgcggttcacccaggaggaatgggctctgctggatccttctcagaaaatcctgtaccgggacgtgatgagagagacataccggaatctgacctccgtgggcatcaactgggaatgttgggaccttgaagcctgcttcagaagcctgggaagaaacctgagagtgcaggtggtgaagagaaagtgcgagctgaccaacagcggcccctgcgccgagggcggcccaagcagcggcgcccctcctcccagcggcggcagcccagccggctccccaacctctaccgaggagggcacctctgagtccgccacccccgagagcggccctggcacctccaccgagcccagcgagggcagcgcacccggcagccctgccggcagccccacctccacagaggagggaaccagcaccgagcccagcgaaggcagcgccccaggcaccagcaccgagcctagtgagcaggagattaaacggatcaacaagatcagaagaagacttgtgaaagacagcaacaccaagaaggccggcaagacaggccccatgaaaaccctgctggttagagtgatgacacccgatctgagagagcggctggaaaacctgagaaagaagcctgaaaatatcccccagcccatcagcaatacatctagagccaacctgaataagctgctgaccgattacaccgaaatgaagaaggcgatcctgcatgtgtactgggaagagttccagaaggaccctgtgggcctgatgagccgggtggcccagcctgccagcaagaagatcgatcagaacaagctgaaacctgagatggacgagaagggcaacctgaccaccgccggctttgcctgctctcagtgtggccagcccctgttcgtgtacaagctggagcaggtgtctgagaagggcaaggcttacaccaactacttcggacggtgcaatgtggccgagcacgaaaagctgatcctgctggcccagctgaagcccgagaaggatagcgacgaagccgtgacatatagcctgggaaagtttgggcagagggccctggatttctacagcattcatgtgaccaaggagtccacccaccccgtgaagcccctggcccagatcgccggaaacagatacgcctccggacctgtgggaaaggccctgagcgacgcatgtatgggcacaatcgcctccttcctgtctaagtaccaggacatcatcatcgaacaccagaaggtggtgaagggcaaccagaagagactggagagcctgcgggagctggccggcaaggaaaacctggaataccctagcgtgaccctgccacctcagcctcacaccaaggagggcgttgatgcctacaacgaagtgatcgcccgggtgcgaatgtgggtgaacctgaacctgtggcagaagctgaagctaagcagagatgatgccaagcctctgctgagactgaagggattcccttcctttcctctggtcgagagacaggccaacgaagtggactggtgggacatggtgtgtaacgtgaagaagctgatcaacgagaaaaaggaggatggcaaggtgttttggcagaatctggctggctacaagagacaggaagccctgagaccatacctgagcagcgaggaagatcggaagaagggaaagaaattcgctcggtaccagctgggcgacctgctgctgcacctggaaaagaagcacggcgaggactggggaaaggtgtacgacgaggcctgggagcggattgacaagaaagtggaaggcctgagcaagcacatcaagctggaagaggaacggagaagcgaggacgcccagagcaaggccgccctgaccgactggctgcgggctaaggccagcttcgtgatcgagggcctgaaggaggccgacaaggacgagttctgcagatgcgagctgaagctgcagaagtggtacggggacctgcggggaaagcccttcgccatcgaagccgagaacagcatcctggacatcagcggcttcagcaagcagtacaactgtgccttcatctggcagaaggacggcgtgaagaagctgaacctgtacctgatcatcaactacttcaagggcggcaagctgcggttcaagaagatcaaacctgaagccttcgaagccaacagattctacaccgtgatcaacaaaaagagcggcgagatcgtgcccatggaggtgaacttcaacttcgacgaccccaacctgatcatcctgcctctggcctttggcaagagacagggcagagaattcatctggaacgacctgctgtccctggaaaccggcagcctgaagctggccaacggaagagtgatcgagaagacactgtacaacagaagaacccggcaggatgagcctgccctgttcgtggccctgaccttcgagcggcgggaggtcctggactcctccaatatcaaaccaatgaacctgatcggcgtggcaagaggcgaaaacatccccgccgtgatcgccctgaccgaccccgagggctgcccactgagccggtttaaggatagcctgggaaacccaacccacatcctgagaatcggcgagagctataaggagaagcagcggaccatccaggccaagaaggaggtggagcagcggagagccggcggctacagccggaagtacgccagcaaagccaagaatctggcagacgatatggtgagaaacaccgctagagatctgctgtactacgccgtgacccaggatgccatgctgatcttcgccaacctgagccggggcttcggccggcagggcaagcggaccttcatggccgagagacagtacacacggatggaggactggctgaccgccaagctggcctacgagggcctgagcaagacctacctgtccaagacactggcccagtacacctccaagacatgcagcaactgtgggtttaccatcaccagcgccgactacgacagggtgctggagaagctgaagaagacagcaacaggctggatgaccacaattaacggcaaggagctgaaggtggagggccagattacctactacaacagatacaagagacagaacgtagtcaaggacctgtccgtcgagctggatagactgagcgaagaatctgtgaacaacgacatctcctcctggacaaagggcagaagcggagaagctctgagcctcctgaagaaaagattctcccatagacccgtgcaggagaagttcgtgtgcctgaactgcggcttcgagacacacgcagccgagcaagccgccctgaacatcgccagatcctggctgttcctgcggagccaggagtacaagaaataccagacaaacaagacaaccggcaacaccgataagagagccttcgtcgagacctggcagtccttttaccggaagaagcttaaggaggtgtggaaacctgccgtgcggtctggcggatctggcggaggctcctgagatgggcctgctgacattcagagacatcgctatcgagttcagcctggaggaatggcaatgtctggactgcgcccagagaaatctgtacagagatgtgatgctggaaaactaccggaacctggtgtctctgggcatcgccgtgtccaagcccgacctgatcacctgcctcgagcagaacaaggaaagccagaacatcaagcggaacaaaatggtcgccaagcaccctgtgatgcacagccacggatctggctccggcagcggccccaagaaaaagagaaaagtctaagctgccttctgcggggcttgccttctggccatgcccttcttctctcccttgcacctgtacctcttggtctttgaataaagcctgagtaggaaggctagcaaaaaaaaaaaaaaaaaaaaaaaaaaaaaaaaaaaaaaaaaaaaaaaaaaaaaaaaaaaaaaaaaaaaaaaaaaaaaaaa

SEQ ID NO: 18498 - RNA, 9485 nt, synthetic construct
  source 1..9485: mol_type = other RNA
aggaaataagagagaaaagaagagtaagaagaaatataagagccaccatggcccctaagaagaagcgtaaagtgagccggatggaacgcctcgtctacgaggtgcggcagaagtgcagaaacatcgaggacatctgcatctcctgcggatctctgaacgtgaccctggagcacccactgttcatcggcggcatgtgccagaactgtaaaaactgttttctggagtgtgcctatcaatacgacgatgacggctaccagagctactgcaccatctgttgcggcggaagagaggtgctgatgtgtggaaataacaactgctgccggtgcttctgcgtggaatgcgtggacctgctggtgggccccggcgccgcccaggccgctattaaggaagatccttggaactgctacatgtgcggccacaagggcacatacggcctgctgagacggagagaggactggcctagcagactgcagatgttcttcgccaataaccacgaccaggagttcgacccccctaaggtgtaccctcccgtccccgccgagaagagaaagcccatccgggtcctgagcctgttcgatggcatcgccaccggtctgctggtgctgaaggacctgggcatccaggtggataggtacattgcctccgaggtgtgcgaggactccatcaccgtgggaatggtgcgtcatcagggcaagatcatgtacgtgggcgacgtgcggagcgtgacacagaagcatatccaggagtggggccctttcgacctggtgatcggcggcagcccttgcaatgacctgagcatcgtgaacccagcccggaagggcctgtacgagggaaccggcagactgttcttcgagttttacagactgctgcacgacgcccggcctaaggaaggcgacgaccggcccttcttttggctgttcgagaatgtggtggccatgggagtcagcgacaagcgggatattagccggttcctggagagcaaccccgtgatgatcgatgccaaggaagtgagcgccgcccaccgggccagatacttctggggcaatctgcctggcatgaacagacccctggccagcaccgtgaacgacaagctggagctgcaggagtgcctggagcacggccggatcgccaagttcagcaaggtgagaaccatcaccacccgaagcaacagcatcaaacaaggcaaggaccagcactttcctgtgttcatgaacgagaaggaggacatcctgtggtgtaccgagatggagagagtgttcgggttcccagtccactacacagatgtcagcaacatgtctagactggccagacagagactgctgggaagaagctggtccgtccctgtgatcagacacctgttcgcccctctgaaggagtacttcgcctgcgtgagcagcggcaacagcaacgccaacagccggggccccagcttctctagcggcctggtgccactgtccctgagagggagccacatgggccccatggagatctacaaaaccgtgagcgcctggaagcggcagcctgtgcgcgtgctgagcctgtttcggaatatcgataaagtcctgaaaagcctgggattcctggagagcggctctggctccggcggtggcaccctgaagtacgtggaggatgtgacaaacgtggtcagacgggatgtggagaagtggggccccttcgatctggtgtacggcagcacccaacccctgggcagctcttgtgaccggtgccctggctggtacatgtttcagttccaccggatcctgcagtacgccctgccgagacaggagtcccagcggccattcttttggattttcatggacaacttgctgctgaccgaggatgaccaggaaactaccactcggttcctgcagaccgaagccgtgaccctgcaggacgtgagaggccgggactaccagaacgccatgcgggtgtggtccaacatccctggactgaaaagcaagcacgcacctctgacccctaaagaagaggagtacctgcaggcccaggtgcggagcagaagcaagctggacgcccctaaggtggatctgctggtgaagaattgcctcctgcccctgagagagtacttcaagtatttcagccagaatagtctgcccctgggaggcagcggcggcggcgccctggtgacatttgaggacgtcgccgtgcggttcacccaggaggaatgggctctgctggatccttctcagaaaatcctgtaccgggacgtgatgagagagacataccggaatctgacctccgtgggcatcaactgggaatgttgggaccttgaagcctgcttcagaagcctgggaagaaacctgagagtgcaggtggtgaagagaaagtgcgagctgaccaacagcggcccctgcgccgagggcggcccaagcagcggcgcccctcctcccagcggcggcagcccagccggctccccaacctctaccgaggagggcacctctgagtccgccacccccgagagcggccctggcacctccaccgagcccagcgagggcagcgcacccggcagccctgccggcagccccacctccacagaggagggaaccagcaccgagcccagcgaaggcagcgccccaggcaccagcaccgagcctagtgagcaggagattaaacggatcaacaagatcagaagaagacttgtgaaagacagcaacaccaagaaggccggcaagacaggccccatgaaaaccctgctggttagagtgatgacacccgatctgagagagcggctggaaaacctgagaaagaagcctgaaaatatcccccagcccatcagcaatacatctagagccaacctgaataagctgctgaccgattacaccgaaatgaagaaggcgatcctgcatgtgtactgggaagagttccagaaggaccctgtgggcctgatgagccgggtggcccagcctgccagcaagaagatcgatcagaacaagctgaaacctgagatggacgagaagggcaacctgaccaccgccggctttgcctgctctcagtgtggccagcccctgttcgtgtacaagctggagcaggtgtctgagaagggcaaggcttacaccaactacttcggacggtgcaatgtggccgagcacgaaaagctgatcctgctggcccagctgaagcccgagaaggatagcgacgaagccgtgacatatagcctgggaaagtttgggcagagggccctggatttctacagcattcatgtgaccaaggagtccacccaccccgtgaagcccctggcccagatcgccggaaacagatacgcctccggacctgtgggaaaggccctgagcgacgcatgtatgggcacaatcgcctccttcctgtctaagtaccaggacatcatcatcgaacaccagaaggtggtgaagggcaaccagaagagactggagagcctgcgggagctggccggcaaggaaaacctggaataccctagcgtgaccctgccacctcagcctcacaccaaggagggcgttgatgcctacaacgaagtgatcgcccgggtgcgaatgtgggtgaacctgaacctgtggcagaagctgaagctaagcagagatgatgccaagcctctgctgagactgaagggattcccttcctttcctctggtcgagagacaggccaacgaagtggactggtgggacatggtgtgtaacgtgaagaagctgatcaacgagaaaaaggaggatggcaaggtgttttggcagaatctggctggctacaagagacaggaagccctgagaccatacctgagcagcgaggaagatcggaagaagggaaagaaattcgctcggtaccagctgggcgacctgctgctgcacctggaaaagaagcacggcgaggactggggaaaggtgtacgacgaggcctgggagcggattgacaagaaagtggaaggcctgagcaagcacatcaagctggaagaggaacggagaagcgaggacgcccagagcaaggccgccctgaccgactggctgcgggctaaggccagcttcgtgatcgagggcctgaaggaggccgacaaggacgagttctgcagatgcgagctgaagctgcagaagtggtacggggacctgcggggaaagcccttcgccatcgaagccgagaacagcatcctggacatcagcggcttcagcaagcagtacaactgtgccttcatctggcagaaggacggcgtgaagaagctgaacctgtacctgatcatcaactacttcaagggcggcaagctgcggttcaagaagatcaaacctgaagccttcgaagccaacagattctacaccgtgatcaacaaaaagagcggcgagatcgtgcccatggaggtgaacttcaacttcgacgaccccaacctgatcatcctgcctctggcctttggcaagagacagggcagagaattcatctggaacgacctgctgtccctggaaaccggcagcctgaagctggccaacggaagagtgatcgagaagacactgtacaacagaagaacccggcaggatgagcctgccctgttcgtggccctgaccttcgagcggcgggaggtcctggactcctccaatatcaaaccaatgaacctgatcggcgtggcaagaggcgaaaacatccccgccgtgatcgccctgaccgaccccgagggctgcccactgagccggtttaaggatagcctgggaaacccaacccacatcctgagaatcggcgagagctataaggagaagcagcggaccatccaggccaagaaggaggtggagcagcggagagccggcggctacagccggaagtacgccagcaaagccaagaatctggcagacgatatggtgagaaacaccgctagagatctgctgtactacgccgtgacccaggatgccatgctgatcttcgccaacctgagccggggcttcggccggcagggcaagcggaccttcatggccgagagacagtacacacggatggaggactggctgaccgccaagctggcctacgagggcctgagcaagacctacctgtccaagacactggcccagtacacctccaagacatgcagcaactgtgggtttaccatcaccagcgccgactacgacagggtgctggagaagctgaagaagacagcaacaggctggatgaccacaattaacggcaaggagctgaaggtggagggccagattacctactacaacagatacaagagacagaacgtagtcaaggacctgtccgtcgagctggatagactgagcgaagaatctgtgaacaacgacatctcctcctggacaaagggcagaagcggagaagctctgagcctcctgaagaaaagattctcccatagacccgtgcaggagaagttcgtgtgcctgaactgcggcttcgagacacacgcagccgagcaagccgccctgaacatcgccagatcctggctgttcctgcggagccaggagtacaagaaataccagacaaacaagacaaccggcaacaccgataagagagccttcgtcgagacctggcagtccttttaccggaagaagcttaaggaggtgtggaaacctgccgtgcggtctggcggatctggcggaggctccgccctggtgacatttgaggacgtcgccgtgcggttcacccaggaggaatgggctctgctggatccttctcagaaaatcctgtaccgggacgtgatgagagagacataccggaatctgacctccgtgggcatcaactgggaatgttgggaccttgaagcctgcttcagaagcctgggaagaaacctgagagtgcaggtggtgaagagaaagtgcgagctgaccaacagcggcccctgcgccgagggcggcccaagcagcggcgcccctcctcccagcggcggcagcccagccggctccccaacctctaccgaggagggcacctctgagtccgccacccccgagagcggccctggcacctccaccgagcccagcgagggcagcgcacccggcagccctgccggcagccccacctccacagaggagggaaccagcaccgagcccagcgaaggcagcgccccaggcaccagcaccgagcctagtgagcaggagattaaacggatcaacaagatcagaagaagacttgtgaaagacagcaacaccaagaaggccggcaagacaggccccatgaaaaccctgctggttagagtgatgacacccgatctgagagagcggctggaaaacctgagaaagaagcctgaaaatatcccccagcccatcagcaatacatctagagccaacctgaataagctgctgaccgattacaccgaaatgaagaaggcgatcctgcatgtgtactgggaagagttccagaaggaccctgtgggcctgatgagccgggtggcccagcctgccagcaagaagatcgatcagaacaagctgaaacctgagatggacgagaagggcaacctgaccaccgccggctttgcctgctctcagtgtggccagcccctgttcgtgtacaagctggagcaggtgtctgagaagggcaaggcttacaccaactacttcggacggtgcaatgtggccgagcacgaaaagctgatcctgctggcccagctgaagcccgagaaggatagcgacgaagccgtgacatatagcctgggaaagtttgggcagagggccctggatttctacagcattcatgtgaccaaggagtccacccaccccgtgaagcccctggcccagatcgccggaaacagatacgcctccggacctgtgggaaaggccctgagcgacgcatgtatgggcacaatcgcctccttcctgtctaagtaccaggacatcatcatcgaacaccagaaggtggtgaagggcaaccagaagagactggagagcctgcgggagctggccggcaaggaaaacctggaataccctagcgtgaccctgccacctcagcctcacaccaaggagggcgttgatgcctacaacgaagtgatcgcccgggtgcgaatgtgggtgaacctgaacctgtggcagaagctgaagctaagcagagatgatgccaagcctctgctgagactgaagggattcccttcctttcctctggtcgagagacaggccaacgaagtggactggtgggacatggtgtgtaacgtgaagaagctgatcaacgagaaaaaggaggatggcaaggtgttttggcagaatctggctggctacaagagacaggaagccctgagaccatacctgagcagcgaggaagatcggaagaagggaaagaaattcgctcggtaccagctgggcgacctgctgctgcacctggaaaagaagcacggcgaggactggggaaaggtgtacgacgaggcctgggagcggattgacaagaaagtggaaggcctgagcaagcacatcaagctggaagaggaacggagaagcgaggacgcccagagcaaggccgccctgaccgactggctgcgggctaaggccagcttcgtgatcgagggcctgaaggaggccgacaaggacgagttctgcagatgcgagctgaagctgcagaagtggtacggggacctgcggggaaagcccttcgccatcgaagccgagaacagcatcctggacatcagcggcttcagcaagcagtacaactgtgccttcatctggcagaaggacggcgtgaagaagctgaacctgtacctgatcatcaactacttcaagggcggcaagctgcggttcaagaagatcaaacctgaagccttcgaagccaacagattctacaccgtgatcaacaaaaagagcggcgagatcgtgcccatggaggtgaacttcaacttcgacgaccccaacctgatcatcctgcctctggcctttggcaagagacagggcagagaattcatctggaacgacctgctgtccctggaaaccggcagcctgaagctggccaacggaagagtgatcgagaagacactgtacaacagaagaacccggcaggatgagcctgccctgttcgtggccctgaccttcgagcggcgggaggtcctggactcctccaatatcaaaccaatgaacctgatcggcgtggcaagaggcgaaaacatccccgccgtgatcgccctgaccgaccccgagggctgcccactgagccggtttaaggatagcctgggaaacccaacccacatcctgagaatcggcgagagctataaggagaagcagcggaccatccaggccaagaaggaggtggagcagcggagagccggcggctacagccggaagtacgccagcaaagccaagaatctggcagacgatatggtgagaaacaccgctagagatctgctgtactacgccgtgacccaggatgccatgctgatcttcgccaacctgagccggggcttcggccggcagggcaagcggaccttcatggccgagagacagtacacacggatggaggactggctgaccgccaagctggcctacgagggcctgagcaagacctacctgtccaagacactggcccagtacacctccaagacatgcagcaactgtgggtttaccatcaccagcgccgactacgacagggtgctggagaagctgaagaagacagcaacaggctggatgaccacaattaacggcaaggagctgaaggtggagggccagattacctactacaacagatacaagagacagaacgtagtcaaggacctgtccgtcgagctggatagactgagcgaagaatctgtgaacaacgacatctcctcctggacaaagggcagaagcggagaagctctgagcctcctgaagaaaagattctcccatagacccgtgcaggagaagttcgtgtgcctgaactgcggcttcgagacacacgcagccgagcaagccgccctgaacatcgccagatcctggctgttcctgcggagccaggagtacaagaaataccagacaaacaagacaaccggcaacaccgataagagagccttcgtcgagacctggcagtccttttaccggaagaagcttaaggaggtgtggaaacctgccgtgcggtctggcggatctggcggaggctcctctgctgaccttcgaggacgtcgccgtgtccttcagcgaggaagaatgggagctgctcgatcctcctcagaaaaccctgtacaacgacgtgatgcaagagaactacgagacagtgatctctctgggcctgaagctgaagaacgacaccggaaatgatcagcccatcagcatcagcgccctggaaatgcaggccagcggcagcaaggtgctgcggaaggccagaatgaaagtggctcagaagacaggatctggctccggcagcggccccaagaaaaagagaaaagtctaagctgccttctgcggggcttgccttctggccatgcccttcttctctcccttgcacctgtacctcttggtctttgaataaagcctgagtaggaaggctagcaaaaaaaaaaaaaaaaaaaaaaaaaaaaaaaaaaaaaaaaaaaaaaaaaaaaaaaaaaaaaaaaaaaaaaaaaaaaaaaa

SEQ ID NO: 18499 - RNA, 9485 nt, synthetic construct
  source 1..9485: mol_type = other RNA
aggaaataagagagaaaagaagagtaagaagaaatataagagccaccatggcccctaagaagaagcgtaaagtgagccggatggaacgcctcgtctacgaggtgcggcagaagtgcagaaacatcgaggacatctgcatctcctgcggatctctgaacgtgaccctggagcacccactgttcatcggcggcatgtgccagaactgtaaaaactgttttctggagtgtgcctatcaatacgacgatgacggctaccagagctactgcaccatctgttgcggcggaagagaggtgctgatgtgtggaaataacaactgctgccggtgcttctgcgtggaatgcgtggacctgctggtgggccccggcgccgcccaggccgctattaaggaagatccttggaactgctacatgtgcggccacaagggcacatacggcctgctgagacggagagaggactggcctagcagactgcagatgttcttcgccaataaccacgaccaggagttcgacccccctaaggtgtaccctcccgtccccgccgagaagagaaagcccatccgggtcctgagcctgttcgatggcatcgccaccggtctgctggtgctgaaggacctgggcatccaggtggataggtacattgcctccgaggtgtgcgaggactccatcaccgtgggaatggtgcgtcatcagggcaagatcatgtacgtgggcgacgtgcggagcgtgacacagaagcatatccaggagtggggccctttcgacctggtgatcggcggcagcccttgcaatgacctgagcatcgtgaacccagcccggaagggcctgtacgagggaaccggcagactgttcttcgagttttacagactgctgcacgacgcccggcctaaggaaggcgacgaccggcccttcttttggctgttcgagaatgtggtggccatgggagtcagcgacaagcgggatattagccggttcctggagagcaaccccgtgatgatcgatgccaaggaagtgagcgccgcccaccgggccagatacttctggggcaatctgcctggcatgaacagacccctggccagcaccgtgaacgacaagctggagctgcaggagtgcctggagcacggccggatcgccaagttcagcaaggtgagaaccatcaccacccgaagcaacagcatcaaacaaggcaaggaccagcactttcctgtgttcatgaacgagaaggaggacatcctgtggtgtaccgagatggagagagtgttcgggttcccagtccactacacagatgtcagcaacatgtctagactggccagacagagactgctgggaagaagctggtccgtccctgtgatcagacacctgttcgcccctctgaaggagtacttcgcctgcgtgagcagcggcaacagcaacgccaacagccggggccccagcttctctagcggcctggtgccactgtccctgagagggagccacatgggccccatggagatctacaaaaccgtgagcgcctggaagcggcagcctgtgcgcgtgctgagcctgtttcggaatatcgataaagtcctgaaaagcctgggattcctggagagcggctctggctccggcggtggcaccctgaagtacgtggaggatgtgacaaacgtggtcagacgggatgtggagaagtggggccccttcgatctggtgtacggcagcacccaacccctgggcagctcttgtgaccggtgccctggctggtacatgtttcagttccaccggatcctgcagtacgccctgccgagacaggagtcccagcggccattcttttggattttcatggacaacttgctgctgaccgaggatgaccaggaaactaccactcggttcctgcagaccgaagccgtgaccctgcaggacgtgagaggccgggactaccagaacgccatgcgggtgtggtccaacatccctggactgaaaagcaagcacgcacctctgacccctaaagaagaggagtacctgcaggcccaggtgcggagcagaagcaagctggacgcccctaaggtggatctgctggtgaagaattgcctcctgcccctgagagagtacttcaagtatttcagccagaatagtctgcccctgggaggcagcggcggcggcgccctggtgacatttgaggacgtcgccgtgcggttcacccaggaggaatgggctctgctggatccttctcagaaaatcctgtaccgggacgtgatgagagagacataccggaatctgacctccgtgggcatcaactgggaatgttgggaccttgaagcctgcttcagaagcctgggaagaaacctgagagtgcaggtggtgaagagaaagtgcgagctgaccaacagcggcccctgcgccgagggcggcccaagcagcggcgcccctcctcccagcggcggcagcccagccggctccccaacctctaccgaggagggcacctctgagtccgccacccccgagagcggccctggcacctccaccgagcccagcgagggcagcgcacccggcagccctgccggcagccccacctccacagaggagggaaccagcaccgagcccagcgaaggcagcgccccaggcaccagcaccgagcctagtgagcaggagattaaacggatcaacaagatcagaagaagacttgtgaaagacagcaacaccaagaaggccggcaagacaggccccatgaaaaccctgctggttagagtgatgacacccgatctgagagagcggctggaaaacctgagaaagaagcctgaaaatatcccccagcccatcagcaatacatctagagccaacctgaataagctgctgaccgattacaccgaaatgaagaaggcgatcctgcatgtgtactgggaagagttccagaaggaccctgtgggcctgatgagccgggtggcccagcctgccagcaagaagatcgatcagaacaagctgaaacctgagatggacgagaagggcaacctgaccaccgccggctttgcctgctctcagtgtggccagcccctgttcgtgtacaagctggagcaggtgtctgagaagggcaaggcttacaccaactacttcggacggtgcaatgtggccgagcacgaaaagctgatcctgctggcccagctgaagcccgagaaggatagcgacgaagccgtgacatatagcctgggaaagtttgggcagagggccctggatttctacagcattcatgtgaccaaggagtccacccaccccgtgaagcccctggcccagatcgccggaaacagatacgcctccggacctgtgggaaaggccctgagcgacgcatgtatgggcacaatcgcctccttcctgtctaagtaccaggacatcatcatcgaacaccagaaggtggtgaagggcaaccagaagagactggagagcctgcgggagctggccggcaaggaaaacctggaataccctagcgtgaccctgccacctcagcctcacaccaaggagggcgttgatgcctacaacgaagtgatcgcccgggtgcgaatgtgggtgaacctgaacctgtggcagaagctgaagctaagcagagatgatgccaagcctctgctgagactgaagggattcccttcctttcctctggtcgagagacaggccaacgaagtggactggtgggacatggtgtgtaacgtgaagaagctgatcaacgagaaaaaggaggatggcaaggtgttttggcagaatctggctggctacaagagacaggaagccctgagaccatacctgagcagcgaggaagatcggaagaagggaaagaaattcgctcggtaccagctgggcgacctgctgctgcacctggaaaagaagcacggcgaggactggggaaaggtgtacgacgaggcctgggagcggattgacaagaaagtggaaggcctgagcaagcacatcaagctggaagaggaacggagaagcgaggacgcccagagcaaggccgccctgaccgactggctgcgggctaaggccagcttcgtgatcgagggcctgaaggaggccgacaaggacgagttctgcagatgcgagctgaagctgcagaagtggtacggggacctgcggggaaagcccttcgccatcgaagccgagaacagcatcctggacatcagcggcttcagcaagcagtacaactgtgccttcatctggcagaaggacggcgtgaagaagctgaacctgtacctgatcatcaactacttcaagggcggcaagctgcggttcaagaagatcaaacctgaagccttcgaagccaacagattctacaccgtgatcaacaaaaagagcggcgagatcgtgcccatggaggtgaacttcaacttcgacgaccccaacctgatcatcctgcctctggcctttggcaagagacagggcagagaattcatctggaacgacctgctgtccctggaaaccggcagcctgaagctggccaacggaagagtgatcgagaagacactgtacaacagaagaacccggcaggatgagcctgccctgttcgtggccctgaccttcgagcggcgggaggtcctggactcctccaatatcaaaccaatgaacctgatcggcgtggcaagaggcgaaaacatccccgccgtgatcgccctgaccgaccccgagggctgcccactgagccggtttaaggatagcctgggaaacccaacccacatcctgagaatcggcgagagctataaggagaagcagcggaccatccaggccaagaaggaggtggagcagcggagagccggcggctacagccggaagtacgccagcaaagccaagaatctggcagacgatatggtgagaaacaccgctagagatctgctgtactacgccgtgacccaggatgccatgctgatcttcgccaacctgagccggggcttcggccggcagggcaagcggaccttcatggccgagagacagtacacacggatggaggactggctgaccgccaagctggcctacgagggcctgagcaagacctacctgtccaagacactggcccagtacacctccaagacatgcagcaactgtgggtttaccatcaccagcgccgactacgacagggtgctggagaagctgaagaagacagcaacaggctggatgaccacaattaacggcaaggagctgaaggtggagggccagattacctactacaacagatacaagagacagaacgtagtcaaggacctgtccgtcgagctggatagactgagcgaagaatctgtgaacaacgacatctcctcctggacaaagggcagaagcggagaagctctgagcctcctgaagaaaagattctcccatagacccgtgcaggagaagttcgtgtgcctgaactgcggcttcgagacacacgcagccgagcaagccgccctgaacatcgccagatcctggctgttcctgcggagccaggagtacaagaaataccagacaaacaagacaaccggcaacaccgataagagagccttcgtcgagacctggcagtccttttaccggaagaagcttaaggaggtgtggaaacctgccgtgcggtctggcggatctggcggaggctcctctacacctgtgaccttcgaggatgtggtggtctacttcaccgccgctgagtgggtgcacctgacaaactggcaaagagatttttatcaggccgtgatgatggaaacctacgagctggtggccagcgtggctggcgacggcgttccaatggccgaggacgaggaaggcggagtggaaagacccgtgtggcagtacatccccagaggcaagcggcggagaaagacccctcagcctcgcgccgacggcggcccaagcagcggcgcccctcctcccagcggcggcagcccagccggctccccaacctctaccgaggagggcacctctgagtccgccacccccgagagcggccctggcacctccaccgagcccagcgagggcagcgcacccggcagccctgccggcagccccacctccacagaggagggaaccagcaccgagcccagcgaaggcagcgccccaggcaccagcaccgagcctagtgagcaggagattaaacggatcaacaagatcagaagaagacttgtgaaagacagcaacaccaagaaggccggcaagacaggccccatgaaaaccctgctggttagagtgatgacacccgatctgagagagcggctggaaaacctgagaaagaagcctgaaaatatcccccagcccatcagcaatacatctagagccaacctgaataagctgctgaccgattacaccgaaatgaagaaggcgatcctgcatgtgtactgggaagagttccagaaggaccctgtgggcctgatgagccgggtggcccagcctgccagcaagaagatcgatcagaacaagctgaaacctgagatggacgagaagggcaacctgaccaccgccggctttgcctgctctcagtgtggccagcccctgttcgtgtacaagctggagcaggtgtctgagaagggcaaggcttacaccaactacttcggacggtgcaatgtggccgagcacgaaaagctgatcctgctggcccagctgaagcccgagaaggatagcgacgaagccgtgacatatagcctgggaaagtttgggcagagggccctggatttctacagcattcatgtgaccaaggagtccacccaccccgtgaagcccctggcccagatcgccggaaacagatacgcctccggacctgtgggaaaggccctgagcgacgcatgtatgggcacaatcgcctccttcctgtctaagtaccaggacatcatcatcgaacaccagaaggtggtgaagggcaaccagaagagactggagagcctgcgggagctggccggcaaggaaaacctggaataccctagcgtgaccctgccacctcagcctcacaccaaggagggcgttgatgcctacaacgaagtgatcgcccgggtgcgaatgtgggtgaacctgaacctgtggcagaagctgaagctaagcagagatgatgccaagcctctgctgagactgaagggattcccttcctttcctctggtcgagagacaggccaacgaagtggactggtgggacatggtgtgtaacgtgaagaagctgatcaacgagaaaaaggaggatggcaaggtgttttggcagaatctggctggctacaagagacaggaagccctgagaccatacctgagcagcgaggaagatcggaagaagggaaagaaattcgctcggtaccagctgggcgacctgctgctgcacctggaaaagaagcacggcgaggactggggaaaggtgtacgacgaggcctgggagcggattgacaagaaagtggaaggcctgagcaagcacatcaagctggaagaggaacggagaagcgaggacgcccagagcaaggccgccctgaccgactggctgcgggctaaggccagcttcgtgatcgagggcctgaaggaggccgacaaggacgagttctgcagatgcgagctgaagctgcagaagtggtacggggacctgcggggaaagcccttcgccatcgaagccgagaacagcatcctggacatcagcggcttcagcaagcagtacaactgtgccttcatctggcagaaggacggcgtgaagaagctgaacctgtacctgatcatcaactacttcaagggcggcaagctgcggttcaagaagatcaaacctgaagccttcgaagccaacagattctacaccgtgatcaacaaaaagagcggcgagatcgtgcccatggaggtgaacttcaacttcgacgaccccaacctgatcatcctgcctctggcctttggcaagagacagggcagagaattcatctggaacgacctgctgtccctggaaaccggcagcctgaagctggccaacggaagagtgatcgagaagacactgtacaacagaagaacccggcaggatgagcctgccctgttcgtggccctgaccttcgagcggcgggaggtcctggactcctccaatatcaaaccaatgaacctgatcggcgtggcaagaggcgaaaacatccccgccgtgatcgccctgaccgaccccgagggctgcccactgagccggtttaaggatagcctgggaaacccaacccacatcctgagaatcggcgagagctataaggagaagcagcggaccatccaggccaagaaggaggtggagcagcggagagccggcggctacagccggaagtacgccagcaaagccaagaatctggcagacgatatggtgagaaacaccgctagagatctgctgtactacgccgtgacccaggatgccatgctgatcttcgccaacctgagccggggcttcggccggcagggcaagcggaccttcatggccgagagacagtacacacggatggaggactggctgaccgccaagctggcctacgagggcctgagcaagacctacctgtccaagacactggcccagtacacctccaagacatgcagcaactgtgggtttaccatcaccagcgccgactacgacagggtgctggagaagctgaagaagacagcaacaggctggatgaccacaattaacggcaaggagctgaaggtggagggccagattacctactacaacagatacaagagacagaacgtagtcaaggacctgtccgtcgagctggatagactgagcgaagaatctgtgaacaacgacatctcctcctggacaaagggcagaagcggagaagctctgagcctcctgaagaaaagattctcccatagacccgtgcaggagaagttcgtgtgcctgaactgcggcttcgagacacacgcagccgagcaagccgccctgaacatcgccagatcctggctgttcctgcggagccaggagtacaagaaataccagacaaacaagacaaccggcaacaccgataagagagccttcgtcgagacctggcagtccttttaccggaagaagcttaaggaggtgtggaaacctgccgtgcggtctggcggatctggcggaggctcctgccctggtgacatttgaggacgtcgccgtgcggttcacccaggaggaatgggctctgctggatccttctcagaaaatcctgtaccgggacgtgatgagagagacataccggaatctgacctccgtgggcatcaactgggaatgttgggaccttgaagcctgcttcagaagcctgggaagaaacctgagagtgcaggtggtgaagagaaagtgcgagctgaccaacagcggcccctgcgccgagggatctggctccggcagcggccccaagaaaaagagaaaagtctaagctgccttctgcggggcttgccttctggccatgcccttcttctctcccttgcacctgtacctcttggtctttgaataaagcctgagtaggaaggctagcaaaaaaaaaaaaaaaaaaaaaaaaaaaaaaaaaaaaaaaaaaaaaaaaaaaaaaaaaaaaaaaaaaaaaaaaaaaaaaaa

SEQ ID NO: 18500 - RNA, 9485 nt, synthetic construct
  source 1..9485: mol_type = other RNA
aggaaataagagagaaaagaagagtaagaagaaatataagagccaccatggcccctaagaagaagcgtaaagtgagccggatggaacgcctcgtctacgaggtgcggcagaagtgcagaaacatcgaggacatctgcatctcctgcggatctctgaacgtgaccctggagcacccactgttcatcggcggcatgtgccagaactgtaaaaactgttttctggagtgtgcctatcaatacgacgatgacggctaccagagctactgcaccatctgttgcggcggaagagaggtgctgatgtgtggaaataacaactgctgccggtgcttctgcgtggaatgcgtggacctgctggtgggccccggcgccgcccaggccgctattaaggaagatccttggaactgctacatgtgcggccacaagggcacatacggcctgctgagacggagagaggactggcctagcagactgcagatgttcttcgccaataaccacgaccaggagttcgacccccctaaggtgtaccctcccgtccccgccgagaagagaaagcccatccgggtcctgagcctgttcgatggcatcgccaccggtctgctggtgctgaaggacctgggcatccaggtggataggtacattgcctccgaggtgtgcgaggactccatcaccgtgggaatggtgcgtcatcagggcaagatcatgtacgtgggcgacgtgcggagcgtgacacagaagcatatccaggagtggggccctttcgacctggtgatcggcggcagcccttgcaatgacctgagcatcgtgaacccagcccggaagggcctgtacgagggaaccggcagactgttcttcgagttttacagactgctgcacgacgcccggcctaaggaaggcgacgaccggcccttcttttggctgttcgagaatgtggtggccatgggagtcagcgacaagcgggatattagccggttcctggagagcaaccccgtgatgatcgatgccaaggaagtgagcgccgcccaccgggccagatacttctggggcaatctgcctggcatgaacagacccctggccagcaccgtgaacgacaagctggagctgcaggagtgcctggagcacggccggatcgccaagttcagcaaggtgagaaccatcaccacccgaagcaacagcatcaaacaaggcaaggaccagcactttcctgtgttcatgaacgagaaggaggacatcctgtggtgtaccgagatggagagagtgttcgggttcccagtccactacacagatgtcagcaacatgtctagactggccagacagagactgctgggaagaagctggtccgtccctgtgatcagacacctgttcgcccctctgaaggagtacttcgcctgcgtgagcagcggcaacagcaacgccaacagccggggccccagcttctctagcggcctggtgccactgtccctgagagggagccacatgggccccatggagatctacaaaaccgtgagcgcctggaagcggcagcctgtgcgcgtgctgagcctgtttcggaatatcgataaagtcctgaaaagcctgggattcctggagagcggctctggctccggcggtggcaccctgaagtacgtggaggatgtgacaaacgtggtcagacgggatgtggagaagtggggccccttcgatctggtgtacggcagcacccaacccctgggcagctcttgtgaccggtgccctggctggtacatgtttcagttccaccggatcctgcagtacgccctgccgagacaggagtcccagcggccattcttttggattttcatggacaacttgctgctgaccgaggatgaccaggaaactaccactcggttcctgcagaccgaagccgtgaccctgcaggacgtgagaggccgggactaccagaacgccatgcgggtgtggtccaacatccctggactgaaaagcaagcacgcacctctgacccctaaagaagaggagtacctgcaggcccaggtgcggagcagaagcaagctggacgcccctaaggtggatctgctggtgaagaattgcctcctgcccctgagagagtacttcaagtatttcagccagaatagtctgcccctgggaggcagcggcggcggcgccctggtgacatttgaggacgtcgccgtgcggttcacccaggaggaatgggctctgctggatccttctcagaaaatcctgtaccgggacgtgatgagagagacataccggaatctgacctccgtgggcatcaactgggaatgttgggaccttgaagcctgcttcagaagcctgggaagaaacctgagagtgcaggtggtgaagagaaagtgcgagctgaccaacagcggcccctgcgccgagggcggcccaagcagcggcgcccctcctcccagcggcggcagcccagccggctccccaacctctaccgaggagggcacctctgagtccgccacccccgagagcggccctggcacctccaccgagcccagcgagggcagcgcacccggcagccctgccggcagccccacctccacagaggagggaaccagcaccgagcccagcgaaggcagcgccccaggcaccagcaccgagcctagtgagcaggagattaaacggatcaacaagatcagaagaagacttgtgaaagacagcaacaccaagaaggccggcaagacaggccccatgaaaaccctgctggttagagtgatgacacccgatctgagagagcggctggaaaacctgagaaagaagcctgaaaatatcccccagcccatcagcaatacatctagagccaacctgaataagctgctgaccgattacaccgaaatgaagaaggcgatcctgcatgtgtactgggaagagttccagaaggaccctgtgggcctgatgagccgggtggcccagcctgccagcaagaagatcgatcagaacaagctgaaacctgagatggacgagaagggcaacctgaccaccgccggctttgcctgctctcagtgtggccagcccctgttcgtgtacaagctggagcaggtgtctgagaagggcaaggcttacaccaactacttcggacggtgcaatgtggccgagcacgaaaagctgatcctgctggcccagctgaagcccgagaaggatagcgacgaagccgtgacatatagcctgggaaagtttgggcagagggccctggatttctacagcattcatgtgaccaaggagtccacccaccccgtgaagcccctggcccagatcgccggaaacagatacgcctccggacctgtgggaaaggccctgagcgacgcatgtatgggcacaatcgcctccttcctgtctaagtaccaggacatcatcatcgaacaccagaaggtggtgaagggcaaccagaagagactggagagcctgcgggagctggccggcaaggaaaacctggaataccctagcgtgaccctgccacctcagcctcacaccaaggagggcgttgatgcctacaacgaagtgatcgcccgggtgcgaatgtgggtgaacctgaacctgtggcagaagctgaagctaagcagagatgatgccaagcctctgctgagactgaagggattcccttcctttcctctggtcgagagacaggccaacgaagtggactggtgggacatggtgtgtaacgtgaagaagctgatcaacgagaaaaaggaggatggcaaggtgttttggcagaatctggctggctacaagagacaggaagccctgagaccatacctgagcagcgaggaagatcggaagaagggaaagaaattcgctcggtaccagctgggcgacctgctgctgcacctggaaaagaagcacggcgaggactggggaaaggtgtacgacgaggcctgggagcggattgacaagaaagtggaaggcctgagcaagcacatcaagctggaagaggaacggagaagcgaggacgcccagagcaaggccgccctgaccgactggctgcgggctaaggccagcttcgtgatcgagggcctgaaggaggccgacaaggacgagttctgcagatgcgagctgaagctgcagaagtggtacggggacctgcggggaaagcccttcgccatcgaagccgagaacagcatcctggacatcagcggcttcagcaagcagtacaactgtgccttcatctggcagaaggacggcgtgaagaagctgaacctgtacctgatcatcaactacttcaagggcggcaagctgcggttcaagaagatcaaacctgaagccttcgaagccaacagattctacaccgtgatcaacaaaaagagcggcgagatcgtgcccatggaggtgaacttcaacttcgacgaccccaacctgatcatcctgcctctggcctttggcaagagacagggcagagaattcatctggaacgacctgctgtccctggaaaccggcagcctgaagctggccaacggaagagtgatcgagaagacactgtacaacagaagaacccggcaggatgagcctgccctgttcgtggccctgaccttcgagcggcgggaggtcctggactcctccaatatcaaaccaatgaacctgatcggcgtggcaagaggcgaaaacatccccgccgtgatcgccctgaccgaccccgagggctgcccactgagccggtttaaggatagcctgggaaacccaacccacatcctgagaatcggcgagagctataaggagaagcagcggaccatccaggccaagaaggaggtggagcagcggagagccggcggctacagccggaagtacgccagcaaagccaagaatctggcagacgatatggtgagaaacaccgctagagatctgctgtactacgccgtgacccaggatgccatgctgatcttcgccaacctgagccggggcttcggccggcagggcaagcggaccttcatggccgagagacagtacacacggatggaggactggctgaccgccaagctggcctacgagggcctgagcaagacctacctgtccaagacactggcccagtacacctccaagacatgcagcaactgtgggtttaccatcaccagcgccgactacgacagggtgctggagaagctgaagaagacagcaacaggctggatgaccacaattaacggcaaggagctgaaggtggagggccagattacctactacaacagatacaagagacagaacgtagtcaaggacctgtccgtcgagctggatagactgagcgaagaatctgtgaacaacgacatctcctcctggacaaagggcagaagcggagaagctctgagcctcctgaagaaaagattctcccatagacccgtgcaggagaagttcgtgtgcctgaactgcggcttcgagacacacgcagccgagcaagccgccctgaacatcgccagatcctggctgttcctgcggagccaggagtacaagaaataccagacaaacaagacaaccggcaacaccgataagagagccttcgtcgagacctggcagtccttttaccggaagaagcttaaggaggtgtggaaacctgccgtgcggtctggcggatctggcggaggctcctctacacctgtgaccttcgaggatgtggtggtctacttcaccgccgctgagtgggtgcacctgacaaactggcaaagagatttttatcaggccgtgatgatggaaacctacgagctggtggccagcgtggctggcgacggcgttccaatggccgaggacgaggaaggcggagtggaaagacccgtgtggcagtacatccccagaggcaagcggcggagaaagacccctcagcctcgcgccgacggcggcccaagcagcggcgcccctcctcccagcggcggcagcccagccggctccccaacctctaccgaggagggcacctctgagtccgccacccccgagagcggccctggcacctccaccgagcccagcgagggcagcgcacccggcagccctgccggcagccccacctccacagaggagggaaccagcaccgagcccagcgaaggcagcgccccaggcaccagcaccgagcctagtgagcaggagattaaacggatcaacaagatcagaagaagacttgtgaaagacagcaacaccaagaaggccggcaagacaggccccatgaaaaccctgctggttagagtgatgacacccgatctgagagagcggctggaaaacctgagaaagaagcctgaaaatatcccccagcccatcagcaatacatctagagccaacctgaataagctgctgaccgattacaccgaaatgaagaaggcgatcctgcatgtgtactgggaagagttccagaaggaccctgtgggcctgatgagccgggtggcccagcctgccagcaagaagatcgatcagaacaagctgaaacctgagatggacgagaagggcaacctgaccaccgccggctttgcctgctctcagtgtggccagcccctgttcgtgtacaagctggagcaggtgtctgagaagggcaaggcttacaccaactacttcggacggtgcaatgtggccgagcacgaaaagctgatcctgctggcccagctgaagcccgagaaggatagcgacgaagccgtgacatatagcctgggaaagtttgggcagagggccctggatttctacagcattcatgtgaccaaggagtccacccaccccgtgaagcccctggcccagatcgccggaaacagatacgcctccggacctgtgggaaaggccctgagcgacgcatgtatgggcacaatcgcctccttcctgtctaagtaccaggacatcatcatcgaacaccagaaggtggtgaagggcaaccagaagagactggagagcctgcgggagctggccggcaaggaaaacctggaataccctagcgtgaccctgccacctcagcctcacaccaaggagggcgttgatgcctacaacgaagtgatcgcccgggtgcgaatgtgggtgaacctgaacctgtggcagaagctgaagctaagcagagatgatgccaagcctctgctgagactgaagggattcccttcctttcctctggtcgagagacaggccaacgaagtggactggtgggacatggtgtgtaacgtgaagaagctgatcaacgagaaaaaggaggatggcaaggtgttttggcagaatctggctggctacaagagacaggaagccctgagaccatacctgagcagcgaggaagatcggaagaagggaaagaaattcgctcggtaccagctgggcgacctgctgctgcacctggaaaagaagcacggcgaggactggggaaaggtgtacgacgaggcctgggagcggattgacaagaaagtggaaggcctgagcaagcacatcaagctggaagaggaacggagaagcgaggacgcccagagcaaggccgccctgaccgactggctgcgggctaaggccagcttcgtgatcgagggcctgaaggaggccgacaaggacgagttctgcagatgcgagctgaagctgcagaagtggtacggggacctgcggggaaagcccttcgccatcgaagccgagaacagcatcctggacatcagcggcttcagcaagcagtacaactgtgccttcatctggcagaaggacggcgtgaagaagctgaacctgtacctgatcatcaactacttcaagggcggcaagctgcggttcaagaagatcaaacctgaagccttcgaagccaacagattctacaccgtgatcaacaaaaagagcggcgagatcgtgcccatggaggtgaacttcaacttcgacgaccccaacctgatcatcctgcctctggcctttggcaagagacagggcagagaattcatctggaacgacctgctgtccctggaaaccggcagcctgaagctggccaacggaagagtgatcgagaagacactgtacaacagaagaacccggcaggatgagcctgccctgttcgtggccctgaccttcgagcggcgggaggtcctggactcctccaatatcaaaccaatgaacctgatcggcgtggcaagaggcgaaaacatccccgccgtgatcgccctgaccgaccccgagggctgcccactgagccggtttaaggatagcctgggaaacccaacccacatcctgagaatcggcgagagctataaggagaagcagcggaccatccaggccaagaaggaggtggagcagcggagagccggcggctacagccggaagtacgccagcaaagccaagaatctggcagacgatatggtgagaaacaccgctagagatctgctgtactacgccgtgacccaggatgccatgctgatcttcgccaacctgagccggggcttcggccggcagggcaagcggaccttcatggccgagagacagtacacacggatggaggactggctgaccgccaagctggcctacgagggcctgagcaagacctacctgtccaagacactggcccagtacacctccaagacatgcagcaactgtgggtttaccatcaccagcgccgactacgacagggtgctggagaagctgaagaagacagcaacaggctggatgaccacaattaacggcaaggagctgaaggtggagggccagattacctactacaacagatacaagagacagaacgtagtcaaggacctgtccgtcgagctggatagactgagcgaagaatctgtgaacaacgacatctcctcctggacaaagggcagaagcggagaagctctgagcctcctgaagaaaagattctcccatagacccgtgcaggagaagttcgtgtgcctgaactgcggcttcgagacacacgcagccgagcaagccgccctgaacatcgccagatcctggctgttcctgcggagccaggagtacaagaaataccagacaaacaagacaaccggcaacaccgataagagagccttcgtcgagacctggcagtccttttaccggaagaagcttaaggaggtgtggaaacctgccgtgcggtctggcggatctggcggaggctcctcaggacgtggtgacattcaaggacgtcgccatctacttcagccctgaggaatgggtgcggctgagcgccggacagagagaactgtaccaggaggtgatgctggacaactacgagctggtgaccagcctggatagagagagcaaactgctgtataagatggaccccgaggaagaaagctgcgagggcgtgccatacagctctgccgacagcggcgcccctgatagctcctccacctctgcttgtggatctggctccggcagcggccccaagaaaaagagaaaagtctaagctgccttctgcggggcttgccttctggccatgcccttcttctctcccttgcacctgtacctcttggtctttgaataaagcctgagtaggaaggctagcaaaaaaaaaaaaaaaaaaaaaaaaaaaaaaaaaaaaaaaaaaaaaaaaaaaaaaaaaaaaaaaaaaaaaaaaaaaaaaaa

SEQ ID NO: 18501 - RNA, 9512 nt, synthetic construct
  source 1..9512: mol_type = other RNA
aggaaataagagagaaaagaagagtaagaagaaatataagagccaccatggcccctaagaagaagcgtaaagtgagccggatggaacgcctcgtctacgaggtgcggcagaagtgcagaaacatcgaggacatctgcatctcctgcggatctctgaacgtgaccctggagcacccactgttcatcggcggcatgtgccagaactgtaaaaactgttttctggagtgtgcctatcaatacgacgatgacggctaccagagctactgcaccatctgttgcggcggaagagaggtgctgatgtgtggaaataacaactgctgccggtgcttctgcgtggaatgcgtggacctgctggtgggccccggcgccgcccaggccgctattaaggaagatccttggaactgctacatgtgcggccacaagggcacatacggcctgctgagacggagagaggactggcctagcagactgcagatgttcttcgccaataaccacgaccaggagttcgacccccctaaggtgtaccctcccgtccccgccgagaagagaaagcccatccgggtcctgagcctgttcgatggcatcgccaccggtctgctggtgctgaaggacctgggcatccaggtggataggtacattgcctccgaggtgtgcgaggactccatcaccgtgggaatggtgcgtcatcagggcaagatcatgtacgtgggcgacgtgcggagcgtgacacagaagcatatccaggagtggggccctttcgacctggtgatcggcggcagcccttgcaatgacctgagcatcgtgaacccagcccggaagggcctgtacgagggaaccggcagactgttcttcgagttttacagactgctgcacgacgcccggcctaaggaaggcgacgaccggcccttcttttggctgttcgagaatgtggtggccatgggagtcagcgacaagcgggatattagccggttcctggagagcaaccccgtgatgatcgatgccaaggaagtgagcgccgcccaccgggccagatacttctggggcaatctgcctggcatgaacagacccctggccagcaccgtgaacgacaagctggagctgcaggagtgcctggagcacggccggatcgccaagttcagcaaggtgagaaccatcaccacccgaagcaacagcatcaaacaaggcaaggaccagcactttcctgtgttcatgaacgagaaggaggacatcctgtggtgtaccgagatggagagagtgttcgggttcccagtccactacacagatgtcagcaacatgtctagactggccagacagagactgctgggaagaagctggtccgtccctgtgatcagacacctgttcgcccctctgaaggagtacttcgcctgcgtgagcagcggcaacagcaacgccaacagccggggccccagcttctctagcggcctggtgccactgtccctgagagggagccacatgggccccatggagatctacaaaaccgtgagcgcctggaagcggcagcctgtgcgcgtgctgagcctgtttcggaatatcgataaagtcctgaaaagcctgggattcctggagagcggctctggctccggcggtggcaccctgaagtacgtggaggatgtgacaaacgtggtcagacgggatgtggagaagtggggccccttcgatctggtgtacggcagcacccaacccctgggcagctcttgtgaccggtgccctggctggtacatgtttcagttccaccggatcctgcagtacgccctgccgagacaggagtcccagcggccattcttttggattttcatggacaacttgctgctgaccgaggatgaccaggaaactaccactcggttcctgcagaccgaagccgtgaccctgcaggacgtgagaggccgggactaccagaacgccatgcgggtgtggtccaacatccctggactgaaaagcaagcacgcacctctgacccctaaagaagaggagtacctgcaggcccaggtgcggagcagaagcaagctggacgcccctaaggtggatctgctggtgaagaattgcctcctgcccctgagagagtacttcaagtatttcagccagaatagtctgcccctgggaggcagcggcggcggcgccctggtgacatttgaggacgtcgccgtgcggttcacccaggaggaatgggctctgctggatccttctcagaaaatcctgtaccgggacgtgatgagagagacataccggaatctgacctccgtgggcatcaactgggaatgttgggaccttgaagcctgcttcagaagcctgggaagaaacctgagagtgcaggtggtgaagagaaagtgcgagctgaccaacagcggcccctgcgccgagggcggcccaagcagcggcgcccctcctcccagcggcggcagcccagccggctccccaacctctaccgaggagggcacctctgagtccgccacccccgagagcggccctggcacctccaccgagcccagcgagggcagcgcacccggcagccctgccggcagccccacctccacagaggagggaaccagcaccgagcccagcgaaggcagcgccccaggcaccagcaccgagcctagtgagcaggagattaaacggatcaacaagatcagaagaagacttgtgaaagacagcaacaccaagaaggccggcaagacaggccccatgaaaaccctgctggttagagtgatgacacccgatctgagagagcggctggaaaacctgagaaagaagcctgaaaatatcccccagcccatcagcaatacatctagagccaacctgaataagctgctgaccgattacaccgaaatgaagaaggcgatcctgcatgtgtactgggaagagttccagaaggaccctgtgggcctgatgagccgggtggcccagcctgccagcaagaagatcgatcagaacaagctgaaacctgagatggacgagaagggcaacctgaccaccgccggctttgcctgctctcagtgtggccagcccctgttcgtgtacaagctggagcaggtgtctgagaagggcaaggcttacaccaactacttcggacggtgcaatgtggccgagcacgaaaagctgatcctgctggcccagctgaagcccgagaaggatagcgacgaagccgtgacatatagcctgggaaagtttgggcagagggccctggatttctacagcattcatgtgaccaaggagtccacccaccccgtgaagcccctggcccagatcgccggaaacagatacgcctccggacctgtgggaaaggccctgagcgacgcatgtatgggcacaatcgcctccttcctgtctaagtaccaggacatcatcatcgaacaccagaaggtggtgaagggcaaccagaagagactggagagcctgcgggagctggccggcaaggaaaacctggaataccctagcgtgaccctgccacctcagcctcacaccaaggagggcgttgatgcctacaacgaagtgatcgcccgggtgcgaatgtgggtgaacctgaacctgtggcagaagctgaagctaagcagagatgatgccaagcctctgctgagactgaagggattcccttcctttcctctggtcgagagacaggccaacgaagtggactggtgggacatggtgtgtaacgtgaagaagctgatcaacgagaaaaaggaggatggcaaggtgttttggcagaatctggctggctacaagagacaggaagccctgagaccatacctgagcagcgaggaagatcggaagaagggaaagaaattcgctcggtaccagctgggcgacctgctgctgcacctggaaaagaagcacggcgaggactggggaaaggtgtacgacgaggcctgggagcggattgacaagaaagtggaaggcctgagcaagcacatcaagctggaagaggaacggagaagcgaggacgcccagagcaaggccgccctgaccgactggctgcgggctaaggccagcttcgtgatcgagggcctgaaggaggccgacaaggacgagttctgcagatgcgagctgaagctgcagaagtggtacggggacctgcggggaaagcccttcgccatcgaagccgagaacagcatcctggacatcagcggcttcagcaagcagtacaactgtgccttcatctggcagaaggacggcgtgaagaagctgaacctgtacctgatcatcaactacttcaagggcggcaagctgcggttcaagaagatcaaacctgaagccttcgaagccaacagattctacaccgtgatcaacaaaaagagcggcgagatcgtgcccatggaggtgaacttcaacttcgacgaccccaacctgatcatcctgcctctggcctttggcaagagacagggcagagaattcatctggaacgacctgctgtccctggaaaccggcagcctgaagctggccaacggaagagtgatcgagaagacactgtacaacagaagaacccggcaggatgagcctgccctgttcgtggccctgaccttcgagcggcgggaggtcctggactcctccaatatcaaaccaatgaacctgatcggcgtggcaagaggcgaaaacatccccgccgtgatcgccctgaccgaccccgagggctgcccactgagccggtttaaggatagcctgggaaacccaacccacatcctgagaatcggcgagagctataaggagaagcagcggaccatccaggccaagaaggaggtggagcagcggagagccggcggctacagccggaagtacgccagcaaagccaagaatctggcagacgatatggtgagaaacaccgctagagatctgctgtactacgccgtgacccaggatgccatgctgatcttcgccaacctgagccggggcttcggccggcagggcaagcggaccttcatggccgagagacagtacacacggatggaggactggctgaccgccaagctggcctacgagggcctgagcaagacctacctgtccaagacactggcccagtacacctccaagacatgcagcaactgtgggtttaccatcaccagcgccgactacgacagggtgctggagaagctgaagaagacagcaacaggctggatgaccacaattaacggcaaggagctgaaggtggagggccagattacctactacaacagatacaagagacagaacgtagtcaaggacctgtccgtcgagctggatagactgagcgaagaatctgtgaacaacgacatctcctcctggacaaagggcagaagcggagaagctctgagcctcctgaagaaaagattctcccatagacccgtgcaggagaagttcgtgtgcctgaactgcggcttcgagacacacgcagccgagcaagccgccctgaacatcgccagatcctggctgttcctgcggagccaggagtacaagaaataccagacaaacaagacaaccggcaacaccgataagagagccttcgtcgagacctggcagtccttttaccggaagaagcttaaggaggtgtggaaacctgccgtgcggtctggcggatctggcggaggctcctctacacctgtgaccttcgaggatgtggtggtctacttcaccgccgctgagtgggtgcacctgacaaactggcaaagagatttttatcaggccgtgatgatggaaacctacgagctggtggccagcgtggctggcgacggcgttccaatggccgaggacgaggaaggcggagtggaaagacccgtgtggcagtacatccccagaggcaagcggcggagaaagacccctcagcctcgcgccgacggcggcccaagcagcggcgcccctcctcccagcggcggcagcccagccggctccccaacctctaccgaggagggcacctctgagtccgccacccccgagagcggccctggcacctccaccgagcccagcgagggcagcgcacccggcagccctgccggcagccccacctccacagaggagggaaccagcaccgagcccagcgaaggcagcgccccaggcaccagcaccgagcctagtgagcaggagattaaacggatcaacaagatcagaagaagacttgtgaaagacagcaacaccaagaaggccggcaagacaggccccatgaaaaccctgctggttagagtgatgacacccgatctgagagagcggctggaaaacctgagaaagaagcctgaaaatatcccccagcccatcagcaatacatctagagccaacctgaataagctgctgaccgattacaccgaaatgaagaaggcgatcctgcatgtgtactgggaagagttccagaaggaccctgtgggcctgatgagccgggtggcccagcctgccagcaagaagatcgatcagaacaagctgaaacctgagatggacgagaagggcaacctgaccaccgccggctttgcctgctctcagtgtggccagcccctgttcgtgtacaagctggagcaggtgtctgagaagggcaaggcttacaccaactacttcggacggtgcaatgtggccgagcacgaaaagctgatcctgctggcccagctgaagcccgagaaggatagcgacgaagccgtgacatatagcctgggaaagtttgggcagagggccctggatttctacagcattcatgtgaccaaggagtccacccaccccgtgaagcccctggcccagatcgccggaaacagatacgcctccggacctgtgggaaaggccctgagcgacgcatgtatgggcacaatcgcctccttcctgtctaagtaccaggacatcatcatcgaacaccagaaggtggtgaagggcaaccagaagagactggagagcctgcgggagctggccggcaaggaaaacctggaataccctagcgtgaccctgccacctcagcctcacaccaaggagggcgttgatgcctacaacgaagtgatcgcccgggtgcgaatgtgggtgaacctgaacctgtggcagaagctgaagctaagcagagatgatgccaagcctctgctgagactgaagggattcccttcctttcctctggtcgagagacaggccaacgaagtggactggtgggacatggtgtgtaacgtgaagaagctgatcaacgagaaaaaggaggatggcaaggtgttttggcagaatctggctggctacaagagacaggaagccctgagaccatacctgagcagcgaggaagatcggaagaagggaaagaaattcgctcggtaccagctgggcgacctgctgctgcacctggaaaagaagcacggcgaggactggggaaaggtgtacgacgaggcctgggagcggattgacaagaaagtggaaggcctgagcaagcacatcaagctggaagaggaacggagaagcgaggacgcccagagcaaggccgccctgaccgactggctgcgggctaaggccagcttcgtgatcgagggcctgaaggaggccgacaaggacgagttctgcagatgcgagctgaagctgcagaagtggtacggggacctgcggggaaagcccttcgccatcgaagccgagaacagcatcctggacatcagcggcttcagcaagcagtacaactgtgccttcatctggcagaaggacggcgtgaagaagctgaacctgtacctgatcatcaactacttcaagggcggcaagctgcggttcaagaagatcaaacctgaagccttcgaagccaacagattctacaccgtgatcaacaaaaagagcggcgagatcgtgcccatggaggtgaacttcaacttcgacgaccccaacctgatcatcctgcctctggcctttggcaagagacagggcagagaattcatctggaacgacctgctgtccctggaaaccggcagcctgaagctggccaacggaagagtgatcgagaagacactgtacaacagaagaacccggcaggatgagcctgccctgttcgtggccctgaccttcgagcggcgggaggtcctggactcctccaatatcaaaccaatgaacctgatcggcgtggcaagaggcgaaaacatccccgccgtgatcgccctgaccgaccccgagggctgcccactgagccggtttaaggatagcctgggaaacccaacccacatcctgagaatcggcgagagctataaggagaagcagcggaccatccaggccaagaaggaggtggagcagcggagagccggcggctacagccggaagtacgccagcaaagccaagaatctggcagacgatatggtgagaaacaccgctagagatctgctgtactacgccgtgacccaggatgccatgctgatcttcgccaacctgagccggggcttcggccggcagggcaagcggaccttcatggccgagagacagtacacacggatggaggactggctgaccgccaagctggcctacgagggcctgagcaagacctacctgtccaagacactggcccagtacacctccaagacatgcagcaactgtgggtttaccatcaccagcgccgactacgacagggtgctggagaagctgaagaagacagcaacaggctggatgaccacaattaacggcaaggagctgaaggtggagggccagattacctactacaacagatacaagagacagaacgtagtcaaggacctgtccgtcgagctggatagactgagcgaagaatctgtgaacaacgacatctcctcctggacaaagggcagaagcggagaagctctgagcctcctgaagaaaagattctcccatagacccgtgcaggagaagttcgtgtgcctgaactgcggcttcgagacacacgcagccgagcaagccgccctgaacatcgccagatcctggctgttcctgcggagccaggagtacaagaaataccagacaaacaagacaaccggcaacaccgataagagagccttcgtcgagacctggcagtccttttaccggaagaagcttaaggaggtgtggaaacctgccgtgcggtctggcggatctggcggaggctcctgtcgccttccgggacgtgatcgtggacttcacccaggaggaatggcagcagctgaagcctgctcaaaaggacctgtacagagatgtgatgatggaaatctactggaatctggtgtctctggacctggaaaccgagggagatatgaacgagcctgaccccgagaaagacagctgggaggatagaacaagcatcgtggttgtggaaggcctgatgcggaacggcgcccagggctacgcctgcgagaaggccggcatccagggctgtagagtgggatctggctccggcagcggccccaagaaaaagagaaaagtctaagctgccttctgcggggcttgccttctggccatgcccttcttctctcccttgcacctgtacctcttggtctttgaataaagcctgagtaggaaggctagcaaaaaaaaaaaaaaaaaaaaaaaaaaaaaaaaaaaaaaaaaaaaaaaaaaaaaaaaaaaaaaaaaaaaaaaaaaaaaaaa

SEQ ID NO: 18502 - RNA, 9494 nt, synthetic construct
  source 1..9494: mol_type = other RNA
aggaaataagagagaaaagaagagtaagaagaaatataagagccaccatggcccctaagaagaagcgtaaagtgagccggatggaacgcctcgtctacgaggtgcggcagaagtgcagaaacatcgaggacatctgcatctcctgcggatctctgaacgtgaccctggagcacccactgttcatcggcggcatgtgccagaactgtaaaaactgttttctggagtgtgcctatcaatacgacgatgacggctaccagagctactgcaccatctgttgcggcggaagagaggtgctgatgtgtggaaataacaactgctgccggtgcttctgcgtggaatgcgtggacctgctggtgggccccggcgccgcccaggccgctattaaggaagatccttggaactgctacatgtgcggccacaagggcacatacggcctgctgagacggagagaggactggcctagcagactgcagatgttcttcgccaataaccacgaccaggagttcgacccccctaaggtgtaccctcccgtccccgccgagaagagaaagcccatccgggtcctgagcctgttcgatggcatcgccaccggtctgctggtgctgaaggacctgggcatccaggtggataggtacattgcctccgaggtgtgcgaggactccatcaccgtgggaatggtgcgtcatcagggcaagatcatgtacgtgggcgacgtgcggagcgtgacacagaagcatatccaggagtggggccctttcgacctggtgatcggcggcagcccttgcaatgacctgagcatcgtgaacccagcccggaagggcctgtacgagggaaccggcagactgttcttcgagttttacagactgctgcacgacgcccggcctaaggaaggcgacgaccggcccttcttttggctgttcgagaatgtggtggccatgggagtcagcgacaagcgggatattagccggttcctggagagcaaccccgtgatgatcgatgccaaggaagtgagcgccgcccaccgggccagatacttctggggcaatctgcctggcatgaacagacccctggccagcaccgtgaacgacaagctggagctgcaggagtgcctggagcacggccggatcgccaagttcagcaaggtgagaaccatcaccacccgaagcaacagcatcaaacaaggcaaggaccagcactttcctgtgttcatgaacgagaaggaggacatcctgtggtgtaccgagatggagagagtgttcgggttcccagtccactacacagatgtcagcaacatgtctagactggccagacagagactgctgggaagaagctggtccgtccctgtgatcagacacctgttcgcccctctgaaggagtacttcgcctgcgtgagcagcggcaacagcaacgccaacagccggggccccagcttctctagcggcctggtgccactgtccctgagagggagccacatgggccccatggagatctacaaaaccgtgagcgcctggaagcggcagcctgtgcgcgtgctgagcctgtttcggaatatcgataaagtcctgaaaagcctgggattcctggagagcggctctggctccggcggtggcaccctgaagtacgtggaggatgtgacaaacgtggtcagacgggatgtggagaagtggggccccttcgatctggtgtacggcagcacccaacccctgggcagctcttgtgaccggtgccctggctggtacatgtttcagttccaccggatcctgcagtacgccctgccgagacaggagtcccagcggccattcttttggattttcatggacaacttgctgctgaccgaggatgaccaggaaactaccactcggttcctgcagaccgaagccgtgaccctgcaggacgtgagaggccgggactaccagaacgccatgcgggtgtggtccaacatccctggactgaaaagcaagcacgcacctctgacccctaaagaagaggagtacctgcaggcccaggtgcggagcagaagcaagctggacgcccctaaggtggatctgctggtgaagaattgcctcctgcccctgagagagtacttcaagtatttcagccagaatagtctgcccctgggaggcagcggcggcggcgccctggtgacatttgaggacgtcgccgtgcggttcacccaggaggaatgggctctgctggatccttctcagaaaatcctgtaccgggacgtgatgagagagacataccggaatctgacctccgtgggcatcaactgggaatgttgggaccttgaagcctgcttcagaagcctgggaagaaacctgagagtgcaggtggtgaagagaaagtgcgagctgaccaacagcggcccctgcgccgagggcggcccaagcagcggcgcccctcctcccagcggcggcagcccagccggctccccaacctctaccgaggagggcacctctgagtccgccacccccgagagcggccctggcacctccaccgagcccagcgagggcagcgcacccggcagccctgccggcagccccacctccacagaggagggaaccagcaccgagcccagcgaaggcagcgccccaggcaccagcaccgagcctagtgagcaggagattaaacggatcaacaagatcagaagaagacttgtgaaagacagcaacaccaagaaggccggcaagacaggccccatgaaaaccctgctggttagagtgatgacacccgatctgagagagcggctggaaaacctgagaaagaagcctgaaaatatcccccagcccatcagcaatacatctagagccaacctgaataagctgctgaccgattacaccgaaatgaagaaggcgatcctgcatgtgtactgggaagagttccagaaggaccctgtgggcctgatgagccgggtggcccagcctgccagcaagaagatcgatcagaacaagctgaaacctgagatggacgagaagggcaacctgaccaccgccggctttgcctgctctcagtgtggccagcccctgttcgtgtacaagctggagcaggtgtctgagaagggcaaggcttacaccaactacttcggacggtgcaatgtggccgagcacgaaaagctgatcctgctggcccagctgaagcccgagaaggatagcgacgaagccgtgacatatagcctgggaaagtttgggcagagggccctggatttctacagcattcatgtgaccaaggagtccacccaccccgtgaagcccctggcccagatcgccggaaacagatacgcctccggacctgtgggaaaggccctgagcgacgcatgtatgggcacaatcgcctccttcctgtctaagtaccaggacatcatcatcgaacaccagaaggtggtgaagggcaaccagaagagactggagagcctgcgggagctggccggcaaggaaaacctggaataccctagcgtgaccctgccacctcagcctcacaccaaggagggcgttgatgcctacaacgaagtgatcgcccgggtgcgaatgtgggtgaacctgaacctgtggcagaagctgaagctaagcagagatgatgccaagcctctgctgagactgaagggattcccttcctttcctctggtcgagagacaggccaacgaagtggactggtgggacatggtgtgtaacgtgaagaagctgatcaacgagaaaaaggaggatggcaaggtgttttggcagaatctggctggctacaagagacaggaagccctgagaccatacctgagcagcgaggaagatcggaagaagggaaagaaattcgctcggtaccagctgggcgacctgctgctgcacctggaaaagaagcacggcgaggactggggaaaggtgtacgacgaggcctgggagcggattgacaagaaagtggaaggcctgagcaagcacatcaagctggaagaggaacggagaagcgaggacgcccagagcaaggccgccctgaccgactggctgcgggctaaggccagcttcgtgatcgagggcctgaaggaggccgacaaggacgagttctgcagatgcgagctgaagctgcagaagtggtacggggacctgcggggaaagcccttcgccatcgaagccgagaacagcatcctggacatcagcggcttcagcaagcagtacaactgtgccttcatctggcagaaggacggcgtgaagaagctgaacctgtacctgatcatcaactacttcaagggcggcaagctgcggttcaagaagatcaaacctgaagccttcgaagccaacagattctacaccgtgatcaacaaaaagagcggcgagatcgtgcccatggaggtgaacttcaacttcgacgaccccaacctgatcatcctgcctctggcctttggcaagagacagggcagagaattcatctggaacgacctgctgtccctggaaaccggcagcctgaagctggccaacggaagagtgatcgagaagacactgtacaacagaagaacccggcaggatgagcctgccctgttcgtggccctgaccttcgagcggcgggaggtcctggactcctccaatatcaaaccaatgaacctgatcggcgtggcaagaggcgaaaacatccccgccgtgatcgccctgaccgaccccgagggctgcccactgagccggtttaaggatagcctgggaaacccaacccacatcctgagaatcggcgagagctataaggagaagcagcggaccatccaggccaagaaggaggtggagcagcggagagccggcggctacagccggaagtacgccagcaaagccaagaatctggcagacgatatggtgagaaacaccgctagagatctgctgtactacgccgtgacccaggatgccatgctgatcttcgccaacctgagccggggcttcggccggcagggcaagcggaccttcatggccgagagacagtacacacggatggaggactggctgaccgccaagctggcctacgagggcctgagcaagacctacctgtccaagacactggcccagtacacctccaagacatgcagcaactgtgggtttaccatcaccagcgccgactacgacagggtgctggagaagctgaagaagacagcaacaggctggatgaccacaattaacggcaaggagctgaaggtggagggccagattacctactacaacagatacaagagacagaacgtagtcaaggacctgtccgtcgagctggatagactgagcgaagaatctgtgaacaacgacatctcctcctggacaaagggcagaagcggagaagctctgagcctcctgaagaaaagattctcccatagacccgtgcaggagaagttcgtgtgcctgaactgcggcttcgagacacacgcagccgagcaagccgccctgaacatcgccagatcctggctgttcctgcggagccaggagtacaagaaataccagacaaacaagacaaccggcaacaccgataagagagccttcgtcgagacctggcagtccttttaccggaagaagcttaaggaggtgtggaaacctgccgtgcggtctggcggatctggcggaggctcctctacacctgtgaccttcgaggatgtggtggtctacttcaccgccgctgagtgggtgcacctgacaaactggcaaagagatttttatcaggccgtgatgatggaaacctacgagctggtggccagcgtggctggcgacggcgttccaatggccgaggacgaggaaggcggagtggaaagacccgtgtggcagtacatccccagaggcaagcggcggagaaagacccctcagcctcgcgccgacggcggcccaagcagcggcgcccctcctcccagcggcggcagcccagccggctccccaacctctaccgaggagggcacctctgagtccgccacccccgagagcggccctggcacctccaccgagcccagcgagggcagcgcacccggcagccctgccggcagccccacctccacagaggagggaaccagcaccgagcccagcgaaggcagcgccccaggcaccagcaccgagcctagtgagcaggagattaaacggatcaacaagatcagaagaagacttgtgaaagacagcaacaccaagaaggccggcaagacaggccccatgaaaaccctgctggttagagtgatgacacccgatctgagagagcggctggaaaacctgagaaagaagcctgaaaatatcccccagcccatcagcaatacatctagagccaacctgaataagctgctgaccgattacaccgaaatgaagaaggcgatcctgcatgtgtactgggaagagttccagaaggaccctgtgggcctgatgagccgggtggcccagcctgccagcaagaagatcgatcagaacaagctgaaacctgagatggacgagaagggcaacctgaccaccgccggctttgcctgctctcagtgtggccagcccctgttcgtgtacaagctggagcaggtgtctgagaagggcaaggcttacaccaactacttcggacggtgcaatgtggccgagcacgaaaagctgatcctgctggcccagctgaagcccgagaaggatagcgacgaagccgtgacatatagcctgggaaagtttgggcagagggccctggatttctacagcattcatgtgaccaaggagtccacccaccccgtgaagcccctggcccagatcgccggaaacagatacgcctccggacctgtgggaaaggccctgagcgacgcatgtatgggcacaatcgcctccttcctgtctaagtaccaggacatcatcatcgaacaccagaaggtggtgaagggcaaccagaagagactggagagcctgcgggagctggccggcaaggaaaacctggaataccctagcgtgaccctgccacctcagcctcacaccaaggagggcgttgatgcctacaacgaagtgatcgcccgggtgcgaatgtgggtgaacctgaacctgtggcagaagctgaagctaagcagagatgatgccaagcctctgctgagactgaagggattcccttcctttcctctggtcgagagacaggccaacgaagtggactggtgggacatggtgtgtaacgtgaagaagctgatcaacgagaaaaaggaggatggcaaggtgttttggcagaatctggctggctacaagagacaggaagccctgagaccatacctgagcagcgaggaagatcggaagaagggaaagaaattcgctcggtaccagctgggcgacctgctgctgcacctggaaaagaagcacggcgaggactggggaaaggtgtacgacgaggcctgggagcggattgacaagaaagtggaaggcctgagcaagcacatcaagctggaagaggaacggagaagcgaggacgcccagagcaaggccgccctgaccgactggctgcgggctaaggccagcttcgtgatcgagggcctgaaggaggccgacaaggacgagttctgcagatgcgagctgaagctgcagaagtggtacggggacctgcggggaaagcccttcgccatcgaagccgagaacagcatcctggacatcagcggcttcagcaagcagtacaactgtgccttcatctggcagaaggacggcgtgaagaagctgaacctgtacctgatcatcaactacttcaagggcggcaagctgcggttcaagaagatcaaacctgaagccttcgaagccaacagattctacaccgtgatcaacaaaaagagcggcgagatcgtgcccatggaggtgaacttcaacttcgacgaccccaacctgatcatcctgcctctggcctttggcaagagacagggcagagaattcatctggaacgacctgctgtccctggaaaccggcagcctgaagctggccaacggaagagtgatcgagaagacactgtacaacagaagaacccggcaggatgagcctgccctgttcgtggccctgaccttcgagcggcgggaggtcctggactcctccaatatcaaaccaatgaacctgatcggcgtggcaagaggcgaaaacatccccgccgtgatcgccctgaccgaccccgagggctgcccactgagccggtttaaggatagcctgggaaacccaacccacatcctgagaatcggcgagagctataaggagaagcagcggaccatccaggccaagaaggaggtggagcagcggagagccggcggctacagccggaagtacgccagcaaagccaagaatctggcagacgatatggtgagaaacaccgctagagatctgctgtactacgccgtgacccaggatgccatgctgatcttcgccaacctgagccggggcttcggccggcagggcaagcggaccttcatggccgagagacagtacacacggatggaggactggctgaccgccaagctggcctacgagggcctgagcaagacctacctgtccaagacactggcccagtacacctccaagacatgcagcaactgtgggtttaccatcaccagcgccgactacgacagggtgctggagaagctgaagaagacagcaacaggctggatgaccacaattaacggcaaggagctgaaggtggagggccagattacctactacaacagatacaagagacagaacgtagtcaaggacctgtccgtcgagctggatagactgagcgaagaatctgtgaacaacgacatctcctcctggacaaagggcagaagcggagaagctctgagcctcctgaagaaaagattctcccatagacccgtgcaggagaagttcgtgtgcctgaactgcggcttcgagacacacgcagccgagcaagccgccctgaacatcgccagatcctggctgttcctgcggagccaggagtacaagaaataccagacaaacaagacaaccggcaacaccgataagagagccttcgtcgagacctggcagtccttttaccggaagaagcttaaggaggtgtggaaacctgccgtgcggtctggcggatctggcggaggctcctgtgacctacaacgacgtgcacgtggacatcacccaggaggaatgggctctgatggaccccagccagcggaacctgtacaaggatgtgatggtcgagacatacatgaacctgaccgccatcggatataattgggagaacctggaagtggaagaaccatgtcagaaccccctgaagcacggcagacacgagagacctcatacaggcgagaaaccttacgagtacaatcagtgcggcaaggccttcgcccaacctggatctggctccggcagcggccccaagaaaaagagaaaagtctaagctgccttctgcggggcttgccttctggccatgcccttcttctctcccttgcacctgtacctcttggtctttgaataaagcctgagtaggaaggctagcaaaaaaaaaaaaaaaaaaaaaaaaaaaaaaaaaaaaaaaaaaaaaaaaaaaaaaaaaaaaaaaaaaaaaaaaaaaaaaaa

SEQ ID NO: 18503 - RNA, 9485 nt, synthetic construct
  source 1..9485: mol_type = other RNA
aggaaataagagagaaaagaagagtaagaagaaatataagagccaccatggcccctaagaagaagcgtaaagtgagccggatggaacgcctcgtctacgaggtgcggcagaagtgcagaaacatcgaggacatctgcatctcctgcggatctctgaacgtgaccctggagcacccactgttcatcggcggcatgtgccagaactgtaaaaactgttttctggagtgtgcctatcaatacgacgatgacggctaccagagctactgcaccatctgttgcggcggaagagaggtgctgatgtgtggaaataacaactgctgccggtgcttctgcgtggaatgcgtggacctgctggtgggccccggcgccgcccaggccgctattaaggaagatccttggaactgctacatgtgcggccacaagggcacatacggcctgctgagacggagagaggactggcctagcagactgcagatgttcttcgccaataaccacgaccaggagttcgacccccctaaggtgtaccctcccgtccccgccgagaagagaaagcccatccgggtcctgagcctgttcgatggcatcgccaccggtctgctggtgctgaaggacctgggcatccaggtggataggtacattgcctccgaggtgtgcgaggactccatcaccgtgggaatggtgcgtcatcagggcaagatcatgtacgtgggcgacgtgcggagcgtgacacagaagcatatccaggagtggggccctttcgacctggtgatcggcggcagcccttgcaatgacctgagcatcgtgaacccagcccggaagggcctgtacgagggaaccggcagactgttcttcgagttttacagactgctgcacgacgcccggcctaaggaaggcgacgaccggcccttcttttggctgttcgagaatgtggtggccatgggagtcagcgacaagcgggatattagccggttcctggagagcaaccccgtgatgatcgatgccaaggaagtgagcgccgcccaccgggccagatacttctggggcaatctgcctggcatgaacagacccctggccagcaccgtgaacgacaagctggagctgcaggagtgcctggagcacggccggatcgccaagttcagcaaggtgagaaccatcaccacccgaagcaacagcatcaaacaaggcaaggaccagcactttcctgtgttcatgaacgagaaggaggacatcctgtggtgtaccgagatggagagagtgttcgggttcccagtccactacacagatgtcagcaacatgtctagactggccagacagagactgctgggaagaagctggtccgtccctgtgatcagacacctgttcgcccctctgaaggagtacttcgcctgcgtgagcagcggcaacagcaacgccaacagccggggccccagcttctctagcggcctggtgccactgtccctgagagggagccacatgggccccatggagatctacaaaaccgtgagcgcctggaagcggcagcctgtgcgcgtgctgagcctgtttcggaatatcgataaagtcctgaaaagcctgggattcctggagagcggctctggctccggcggtggcaccctgaagtacgtggaggatgtgacaaacgtggtcagacgggatgtggagaagtggggccccttcgatctggtgtacggcagcacccaacccctgggcagctcttgtgaccggtgccctggctggtacatgtttcagttccaccggatcctgcagtacgccctgccgagacaggagtcccagcggccattcttttggattttcatggacaacttgctgctgaccgaggatgaccaggaaactaccactcggttcctgcagaccgaagccgtgaccctgcaggacgtgagaggccgggactaccagaacgccatgcgggtgtggtccaacatccctggactgaaaagcaagcacgcacctctgacccctaaagaagaggagtacctgcaggcccaggtgcggagcagaagcaagctggacgcccctaaggtggatctgctggtgaagaattgcctcctgcccctgagagagtacttcaagtatttcagccagaatagtctgcccctgggaggcagcggcggcggcgccctggtgacatttgaggacgtcgccgtgcggttcacccaggaggaatgggctctgctggatccttctcagaaaatcctgtaccgggacgtgatgagagagacataccggaatctgacctccgtgggcatcaactgggaatgttgggaccttgaagcctgcttcagaagcctgggaagaaacctgagagtgcaggtggtgaagagaaagtgcgagctgaccaacagcggcccctgcgccgagggcggcccaagcagcggcgcccctcctcccagcggcggcagcccagccggctccccaacctctaccgaggagggcacctctgagtccgccacccccgagagcggccctggcacctccaccgagcccagcgagggcagcgcacccggcagccctgccggcagccccacctccacagaggagggaaccagcaccgagcccagcgaaggcagcgccccaggcaccagcaccgagcctagtgagcaggagattaaacggatcaacaagatcagaagaagacttgtgaaagacagcaacaccaagaaggccggcaagacaggccccatgaaaaccctgctggttagagtgatgacacccgatctgagagagcggctggaaaacctgagaaagaagcctgaaaatatcccccagcccatcagcaatacatctagagccaacctgaataagctgctgaccgattacaccgaaatgaagaaggcgatcctgcatgtgtactgggaagagttccagaaggaccctgtgggcctgatgagccgggtggcccagcctgccagcaagaagatcgatcagaacaagctgaaacctgagatggacgagaagggcaacctgaccaccgccggctttgcctgctctcagtgtggccagcccctgttcgtgtacaagctggagcaggtgtctgagaagggcaaggcttacaccaactacttcggacggtgcaatgtggccgagcacgaaaagctgatcctgctggcccagctgaagcccgagaaggatagcgacgaagccgtgacatatagcctgggaaagtttgggcagagggccctggatttctacagcattcatgtgaccaaggagtccacccaccccgtgaagcccctggcccagatcgccggaaacagatacgcctccggacctgtgggaaaggccctgagcgacgcatgtatgggcacaatcgcctccttcctgtctaagtaccaggacatcatcatcgaacaccagaaggtggtgaagggcaaccagaagagactggagagcctgcgggagctggccggcaaggaaaacctggaataccctagcgtgaccctgccacctcagcctcacaccaaggagggcgttgatgcctacaacgaagtgatcgcccgggtgcgaatgtgggtgaacctgaacctgtggcagaagctgaagctaagcagagatgatgccaagcctctgctgagactgaagggattcccttcctttcctctggtcgagagacaggccaacgaagtggactggtgggacatggtgtgtaacgtgaagaagctgatcaacgagaaaaaggaggatggcaaggtgttttggcagaatctggctggctacaagagacaggaagccctgagaccatacctgagcagcgaggaagatcggaagaagggaaagaaattcgctcggtaccagctgggcgacctgctgctgcacctggaaaagaagcacggcgaggactggggaaaggtgtacgacgaggcctgggagcggattgacaagaaagtggaaggcctgagcaagcacatcaagctggaagaggaacggagaagcgaggacgcccagagcaaggccgccctgaccgactggctgcgggctaaggccagcttcgtgatcgagggcctgaaggaggccgacaaggacgagttctgcagatgcgagctgaagctgcagaagtggtacggggacctgcggggaaagcccttcgccatcgaagccgagaacagcatcctggacatcagcggcttcagcaagcagtacaactgtgccttcatctggcagaaggacggcgtgaagaagctgaacctgtacctgatcatcaactacttcaagggcggcaagctgcggttcaagaagatcaaacctgaagccttcgaagccaacagattctacaccgtgatcaacaaaaagagcggcgagatcgtgcccatggaggtgaacttcaacttcgacgaccccaacctgatcatcctgcctctggcctttggcaagagacagggcagagaattcatctggaacgacctgctgtccctggaaaccggcagcctgaagctggccaacggaagagtgatcgagaagacactgtacaacagaagaacccggcaggatgagcctgccctgttcgtggccctgaccttcgagcggcgggaggtcctggactcctccaatatcaaaccaatgaacctgatcggcgtggcaagaggcgaaaacatccccgccgtgatcgccctgaccgaccccgagggctgcccactgagccggtttaaggatagcctgggaaacccaacccacatcctgagaatcggcgagagctataaggagaagcagcggaccatccaggccaagaaggaggtggagcagcggagagccggcggctacagccggaagtacgccagcaaagccaagaatctggcagacgatatggtgagaaacaccgctagagatctgctgtactacgccgtgacccaggatgccatgctgatcttcgccaacctgagccggggcttcggccggcagggcaagcggaccttcatggccgagagacagtacacacggatggaggactggctgaccgccaagctggcctacgagggcctgagcaagacctacctgtccaagacactggcccagtacacctccaagacatgcagcaactgtgggtttaccatcaccagcgccgactacgacagggtgctggagaagctgaagaagacagcaacaggctggatgaccacaattaacggcaaggagctgaaggtggagggccagattacctactacaacagatacaagagacagaacgtagtcaaggacctgtccgtcgagctggatagactgagcgaagaatctgtgaacaacgacatctcctcctggacaaagggcagaagcggagaagctctgagcctcctgaagaaaagattctcccatagacccgtgcaggagaagttcgtgtgcctgaactgcggcttcgagacacacgcagccgagcaagccgccctgaacatcgccagatcctggctgttcctgcggagccaggagtacaagaaataccagacaaacaagacaaccggcaacaccgataagagagccttcgtcgagacctggcagtccttttaccggaagaagcttaaggaggtgtggaaacctgccgtgcggtctggcggatctggcggaggctcctctacacctgtgaccttcgaggatgtggtggtctacttcaccgccgctgagtgggtgcacctgacaaactggcaaagagatttttatcaggccgtgatgatggaaacctacgagctggtggccagcgtggctggcgacggcgttccaatggccgaggacgaggaaggcggagtggaaagacccgtgtggcagtacatccccagaggcaagcggcggagaaagacccctcagcctcgcgccgacggcggcccaagcagcggcgcccctcctcccagcggcggcagcccagccggctccccaacctctaccgaggagggcacctctgagtccgccacccccgagagcggccctggcacctccaccgagcccagcgagggcagcgcacccggcagccctgccggcagccccacctccacagaggagggaaccagcaccgagcccagcgaaggcagcgccccaggcaccagcaccgagcctagtgagcaggagattaaacggatcaacaagatcagaagaagacttgtgaaagacagcaacaccaagaaggccggcaagacaggccccatgaaaaccctgctggttagagtgatgacacccgatctgagagagcggctggaaaacctgagaaagaagcctgaaaatatcccccagcccatcagcaatacatctagagccaacctgaataagctgctgaccgattacaccgaaatgaagaaggcgatcctgcatgtgtactgggaagagttccagaaggaccctgtgggcctgatgagccgggtggcccagcctgccagcaagaagatcgatcagaacaagctgaaacctgagatggacgagaagggcaacctgaccaccgccggctttgcctgctctcagtgtggccagcccctgttcgtgtacaagctggagcaggtgtctgagaagggcaaggcttacaccaactacttcggacggtgcaatgtggccgagcacgaaaagctgatcctgctggcccagctgaagcccgagaaggatagcgacgaagccgtgacatatagcctgggaaagtttgggcagagggccctggatttctacagcattcatgtgaccaaggagtccacccaccccgtgaagcccctggcccagatcgccggaaacagatacgcctccggacctgtgggaaaggccctgagcgacgcatgtatgggcacaatcgcctccttcctgtctaagtaccaggacatcatcatcgaacaccagaaggtggtgaagggcaaccagaagagactggagagcctgcgggagctggccggcaaggaaaacctggaataccctagcgtgaccctgccacctcagcctcacaccaaggagggcgttgatgcctacaacgaagtgatcgcccgggtgcgaatgtgggtgaacctgaacctgtggcagaagctgaagctaagcagagatgatgccaagcctctgctgagactgaagggattcccttcctttcctctggtcgagagacaggccaacgaagtggactggtgggacatggtgtgtaacgtgaagaagctgatcaacgagaaaaaggaggatggcaaggtgttttggcagaatctggctggctacaagagacaggaagccctgagaccatacctgagcagcgaggaagatcggaagaagggaaagaaattcgctcggtaccagctgggcgacctgctgctgcacctggaaaagaagcacggcgaggactggggaaaggtgtacgacgaggcctgggagcggattgacaagaaagtggaaggcctgagcaagcacatcaagctggaagaggaacggagaagcgaggacgcccagagcaaggccgccctgaccgactggctgcgggctaaggccagcttcgtgatcgagggcctgaaggaggccgacaaggacgagttctgcagatgcgagctgaagctgcagaagtggtacggggacctgcggggaaagcccttcgccatcgaagccgagaacagcatcctggacatcagcggcttcagcaagcagtacaactgtgccttcatctggcagaaggacggcgtgaagaagctgaacctgtacctgatcatcaactacttcaagggcggcaagctgcggttcaagaagatcaaacctgaagccttcgaagccaacagattctacaccgtgatcaacaaaaagagcggcgagatcgtgcccatggaggtgaacttcaacttcgacgaccccaacctgatcatcctgcctctggcctttggcaagagacagggcagagaattcatctggaacgacctgctgtccctggaaaccggcagcctgaagctggccaacggaagagtgatcgagaagacactgtacaacagaagaacccggcaggatgagcctgccctgttcgtggccctgaccttcgagcggcgggaggtcctggactcctccaatatcaaaccaatgaacctgatcggcgtggcaagaggcgaaaacatccccgccgtgatcgccctgaccgaccccgagggctgcccactgagccggtttaaggatagcctgggaaacccaacccacatcctgagaatcggcgagagctataaggagaagcagcggaccatccaggccaagaaggaggtggagcagcggagagccggcggctacagccggaagtacgccagcaaagccaagaatctggcagacgatatggtgagaaacaccgctagagatctgctgtactacgccgtgacccaggatgccatgctgatcttcgccaacctgagccggggcttcggccggcagggcaagcggaccttcatggccgagagacagtacacacggatggaggactggctgaccgccaagctggcctacgagggcctgagcaagacctacctgtccaagacactggcccagtacacctccaagacatgcagcaactgtgggtttaccatcaccagcgccgactacgacagggtgctggagaagctgaagaagacagcaacaggctggatgaccacaattaacggcaaggagctgaaggtggagggccagattacctactacaacagatacaagagacagaacgtagtcaaggacctgtccgtcgagctggatagactgagcgaagaatctgtgaacaacgacatctcctcctggacaaagggcagaagcggagaagctctgagcctcctgaagaaaagattctcccatagacccgtgcaggagaagttcgtgtgcctgaactgcggcttcgagacacacgcagccgagcaagccgccctgaacatcgccagatcctggctgttcctgcggagccaggagtacaagaaataccagacaaacaagacaaccggcaacaccgataagagagccttcgtcgagacctggcagtccttttaccggaagaagcttaaggaggtgtggaaacctgccgtgcggtctggcggatctggcggaggctccttctcaggagagcgtggccttcgaggacgtggccgtctacttcaccaccaaagagtgggccatcatggtgcccgccgagagagccctgtacagagatgtgatgctggaaaactacgaggccgtggcttttgtggccgtgcctcctacaagcaagcccgctctggtgtcccacctggaacagggcaaggaaagctgcttcatccggcctccaggcgtgctgagcagaagcgactggcgggccggaggatctggctccggcagcggccccaagaaaaagagaaaagtctaagctgccttctgcggggcttgccttctggccatgcccttcttctctcccttgcacctgtacctcttggtctttgaataaagcctgagtaggaaggctagcaaaaaaaaaaaaaaaaaaaaaaaaaaaaaaaaaaaaaaaaaaaaaaaaaaaaaaaaaaaaaaaaaaaaaaaaaaaaaaaa

SEQ ID NO: 18504 - RNA, 9485 nt, synthetic construct
  source 1..9485: mol_type = other RNA
aggaaataagagagaaaagaagagtaagaagaaatataagagccaccatggcccctaagaagaagcgtaaagtgagccggatggaacgcctcgtctacgaggtgcggcagaagtgcagaaacatcgaggacatctgcatctcctgcggatctctgaacgtgaccctggagcacccactgttcatcggcggcatgtgccagaactgtaaaaactgttttctggagtgtgcctatcaatacgacgatgacggctaccagagctactgcaccatctgttgcggcggaagagaggtgctgatgtgtggaaataacaactgctgccggtgcttctgcgtggaatgcgtggacctgctggtgggccccggcgccgcccaggccgctattaaggaagatccttggaactgctacatgtgcggccacaagggcacatacggcctgctgagacggagagaggactggcctagcagactgcagatgttcttcgccaataaccacgaccaggagttcgacccccctaaggtgtaccctcccgtccccgccgagaagagaaagcccatccgggtcctgagcctgttcgatggcatcgccaccggtctgctggtgctgaaggacctgggcatccaggtggataggtacattgcctccgaggtgtgcgaggactccatcaccgtgggaatggtgcgtcatcagggcaagatcatgtacgtgggcgacgtgcggagcgtgacacagaagcatatccaggagtggggccctttcgacctggtgatcggcggcagcccttgcaatgacctgagcatcgtgaacccagcccggaagggcctgtacgagggaaccggcagactgttcttcgagttttacagactgctgcacgacgcccggcctaaggaaggcgacgaccggcccttcttttggctgttcgagaatgtggtggccatgggagtcagcgacaagcgggatattagccggttcctggagagcaaccccgtgatgatcgatgccaaggaagtgagcgccgcccaccgggccagatacttctggggcaatctgcctggcatgaacagacccctggccagcaccgtgaacgacaagctggagctgcaggagtgcctggagcacggccggatcgccaagttcagcaaggtgagaaccatcaccacccgaagcaacagcatcaaacaaggcaaggaccagcactttcctgtgttcatgaacgagaaggaggacatcctgtggtgtaccgagatggagagagtgttcgggttcccagtccactacacagatgtcagcaacatgtctagactggccagacagagactgctgggaagaagctggtccgtccctgtgatcagacacctgttcgcccctctgaaggagtacttcgcctgcgtgagcagcggcaacagcaacgccaacagccggggccccagcttctctagcggcctggtgccactgtccctgagagggagccacatgggccccatggagatctacaaaaccgtgagcgcctggaagcggcagcctgtgcgcgtgctgagcctgtttcggaatatcgataaagtcctgaaaagcctgggattcctggagagcggctctggctccggcggtggcaccctgaagtacgtggaggatgtgacaaacgtggtcagacgggatgtggagaagtggggccccttcgatctggtgtacggcagcacccaacccctgggcagctcttgtgaccggtgccctggctggtacatgtttcagttccaccggatcctgcagtacgccctgccgagacaggagtcccagcggccattcttttggattttcatggacaacttgctgctgaccgaggatgaccaggaaactaccactcggttcctgcagaccgaagccgtgaccctgcaggacgtgagaggccgggactaccagaacgccatgcgggtgtggtccaacatccctggactgaaaagcaagcacgcacctctgacccctaaagaagaggagtacctgcaggcccaggtgcggagcagaagcaagctggacgcccctaaggtggatctgctggtgaagaattgcctcctgcccctgagagagtacttcaagtatttcagccagaatagtctgcccctgggaggcagcggcggcggcgccctggtgacatttgaggacgtcgccgtgcggttcacccaggaggaatgggctctgctggatccttctcagaaaatcctgtaccgggacgtgatgagagagacataccggaatctgacctccgtgggcatcaactgggaatgttgggaccttgaagcctgcttcagaagcctgggaagaaacctgagagtgcaggtggtgaagagaaagtgcgagctgaccaacagcggcccctgcgccgagggcggcccaagcagcggcgcccctcctcccagcggcggcagcccagccggctccccaacctctaccgaggagggcacctctgagtccgccacccccgagagcggccctggcacctccaccgagcccagcgagggcagcgcacccggcagccctgccggcagccccacctccacagaggagggaaccagcaccgagcccagcgaaggcagcgccccaggcaccagcaccgagcctagtgagcaggagattaaacggatcaacaagatcagaagaagacttgtgaaagacagcaacaccaagaaggccggcaagacaggccccatgaaaaccctgctggttagagtgatgacacccgatctgagagagcggctggaaaacctgagaaagaagcctgaaaatatcccccagcccatcagcaatacatctagagccaacctgaataagctgctgaccgattacaccgaaatgaagaaggcgatcctgcatgtgtactgggaagagttccagaaggaccctgtgggcctgatgagccgggtggcccagcctgccagcaagaagatcgatcagaacaagctgaaacctgagatggacgagaagggcaacctgaccaccgccggctttgcctgctctcagtgtggccagcccctgttcgtgtacaagctggagcaggtgtctgagaagggcaaggcttacaccaactacttcggacggtgcaatgtggccgagcacgaaaagctgatcctgctggcccagctgaagcccgagaaggatagcgacgaagccgtgacatatagcctgggaaagtttgggcagagggccctggatttctacagcattcatgtgaccaaggagtccacccaccccgtgaagcccctggcccagatcgccggaaacagatacgcctccggacctgtgggaaaggccctgagcgacgcatgtatgggcacaatcgcctccttcctgtctaagtaccaggacatcatcatcgaacaccagaaggtggtgaagggcaaccagaagagactggagagcctgcgggagctggccggcaaggaaaacctggaataccctagcgtgaccctgccacctcagcctcacaccaaggagggcgttgatgcctacaacgaagtgatcgcccgggtgcgaatgtgggtgaacctgaacctgtggcagaagctgaagctaagcagagatgatgccaagcctctgctgagactgaagggattcccttcctttcctctggtcgagagacaggccaacgaagtggactggtgggacatggtgtgtaacgtgaagaagctgatcaacgagaaaaaggaggatggcaaggtgttttggcagaatctggctggctacaagagacaggaagccctgagaccatacctgagcagcgaggaagatcggaagaagggaaagaaattcgctcggtaccagctgggcgacctgctgctgcacctggaaaagaagcacggcgaggactggggaaaggtgtacgacgaggcctgggagcggattgacaagaaagtggaaggcctgagcaagcacatcaagctggaagaggaacggagaagcgaggacgcccagagcaaggccgccctgaccgactggctgcgggctaaggccagcttcgtgatcgagggcctgaaggaggccgacaaggacgagttctgcagatgcgagctgaagctgcagaagtggtacggggacctgcggggaaagcccttcgccatcgaagccgagaacagcatcctggacatcagcggcttcagcaagcagtacaactgtgccttcatctggcagaaggacggcgtgaagaagctgaacctgtacctgatcatcaactacttcaagggcggcaagctgcggttcaagaagatcaaacctgaagccttcgaagccaacagattctacaccgtgatcaacaaaaagagcggcgagatcgtgcccatggaggtgaacttcaacttcgacgaccccaacctgatcatcctgcctctggcctttggcaagagacagggcagagaattcatctggaacgacctgctgtccctggaaaccggcagcctgaagctggccaacggaagagtgatcgagaagacactgtacaacagaagaacccggcaggatgagcctgccctgttcgtggccctgaccttcgagcggcgggaggtcctggactcctccaatatcaaaccaatgaacctgatcggcgtggcaagaggcgaaaacatccccgccgtgatcgccctgaccgaccccgagggctgcccactgagccggtttaaggatagcctgggaaacccaacccacatcctgagaatcggcgagagctataaggagaagcagcggaccatccaggccaagaaggaggtggagcagcggagagccggcggctacagccggaagtacgccagcaaagccaagaatctggcagacgatatggtgagaaacaccgctagagatctgctgtactacgccgtgacccaggatgccatgctgatcttcgccaacctgagccggggcttcggccggcagggcaagcggaccttcatggccgagagacagtacacacggatggaggactggctgaccgccaagctggcctacgagggcctgagcaagacctacctgtccaagacactggcccagtacacctccaagacatgcagcaactgtgggtttaccatcaccagcgccgactacgacagggtgctggagaagctgaagaagacagcaacaggctggatgaccacaattaacggcaaggagctgaaggtggagggccagattacctactacaacagatacaagagacagaacgtagtcaaggacctgtccgtcgagctggatagactgagcgaagaatctgtgaacaacgacatctcctcctggacaaagggcagaagcggagaagctctgagcctcctgaagaaaagattctcccatagacccgtgcaggagaagttcgtgtgcctgaactgcggcttcgagacacacgcagccgagcaagccgccctgaacatcgccagatcctggctgttcctgcggagccaggagtacaagaaataccagacaaacaagacaaccggcaacaccgataagagagccttcgtcgagacctggcagtccttttaccggaagaagcttaaggaggtgtggaaacctgccgtgcggtctggcggatctggcggaggctcctctacacctgtgaccttcgaggatgtggtggtctacttcaccgccgctgagtgggtgcacctgacaaactggcaaagagatttttatcaggccgtgatgatggaaacctacgagctggtggccagcgtggctggcgacggcgttccaatggccgaggacgaggaaggcggagtggaaagacccgtgtggcagtacatccccagaggcaagcggcggagaaagacccctcagcctcgcgccgacggcggcccaagcagcggcgcccctcctcccagcggcggcagcccagccggctccccaacctctaccgaggagggcacctctgagtccgccacccccgagagcggccctggcacctccaccgagcccagcgagggcagcgcacccggcagccctgccggcagccccacctccacagaggagggaaccagcaccgagcccagcgaaggcagcgccccaggcaccagcaccgagcctagtgagcaggagattaaacggatcaacaagatcagaagaagacttgtgaaagacagcaacaccaagaaggccggcaagacaggccccatgaaaaccctgctggttagagtgatgacacccgatctgagagagcggctggaaaacctgagaaagaagcctgaaaatatcccccagcccatcagcaatacatctagagccaacctgaataagctgctgaccgattacaccgaaatgaagaaggcgatcctgcatgtgtactgggaagagttccagaaggaccctgtgggcctgatgagccgggtggcccagcctgccagcaagaagatcgatcagaacaagctgaaacctgagatggacgagaagggcaacctgaccaccgccggctttgcctgctctcagtgtggccagcccctgttcgtgtacaagctggagcaggtgtctgagaagggcaaggcttacaccaactacttcggacggtgcaatgtggccgagcacgaaaagctgatcctgctggcccagctgaagcccgagaaggatagcgacgaagccgtgacatatagcctgggaaagtttgggcagagggccctggatttctacagcattcatgtgaccaaggagtccacccaccccgtgaagcccctggcccagatcgccggaaacagatacgcctccggacctgtgggaaaggccctgagcgacgcatgtatgggcacaatcgcctccttcctgtctaagtaccaggacatcatcatcgaacaccagaaggtggtgaagggcaaccagaagagactggagagcctgcgggagctggccggcaaggaaaacctggaataccctagcgtgaccctgccacctcagcctcacaccaaggagggcgttgatgcctacaacgaagtgatcgcccgggtgcgaatgtgggtgaacctgaacctgtggcagaagctgaagctaagcagagatgatgccaagcctctgctgagactgaagggattcccttcctttcctctggtcgagagacaggccaacgaagtggactggtgggacatggtgtgtaacgtgaagaagctgatcaacgagaaaaaggaggatggcaaggtgttttggcagaatctggctggctacaagagacaggaagccctgagaccatacctgagcagcgaggaagatcggaagaagggaaagaaattcgctcggtaccagctgggcgacctgctgctgcacctggaaaagaagcacggcgaggactggggaaaggtgtacgacgaggcctgggagcggattgacaagaaagtggaaggcctgagcaagcacatcaagctggaagaggaacggagaagcgaggacgcccagagcaaggccgccctgaccgactggctgcgggctaaggccagcttcgtgatcgagggcctgaaggaggccgacaaggacgagttctgcagatgcgagctgaagctgcagaagtggtacggggacctgcggggaaagcccttcgccatcgaagccgagaacagcatcctggacatcagcggcttcagcaagcagtacaactgtgccttcatctggcagaaggacggcgtgaagaagctgaacctgtacctgatcatcaactacttcaagggcggcaagctgcggttcaagaagatcaaacctgaagccttcgaagccaacagattctacaccgtgatcaacaaaaagagcggcgagatcgtgcccatggaggtgaacttcaacttcgacgaccccaacctgatcatcctgcctctggcctttggcaagagacagggcagagaattcatctggaacgacctgctgtccctggaaaccggcagcctgaagctggccaacggaagagtgatcgagaagacactgtacaacagaagaacccggcaggatgagcctgccctgttcgtggccctgaccttcgagcggcgggaggtcctggactcctccaatatcaaaccaatgaacctgatcggcgtggcaagaggcgaaaacatccccgccgtgatcgccctgaccgaccccgagggctgcccactgagccggtttaaggatagcctgggaaacccaacccacatcctgagaatcggcgagagctataaggagaagcagcggaccatccaggccaagaaggaggtggagcagcggagagccggcggctacagccggaagtacgccagcaaagccaagaatctggcagacgatatggtgagaaacaccgctagagatctgctgtactacgccgtgacccaggatgccatgctgatcttcgccaacctgagccggggcttcggccggcagggcaagcggaccttcatggccgagagacagtacacacggatggaggactggctgaccgccaagctggcctacgagggcctgagcaagacctacctgtccaagacactggcccagtacacctccaagacatgcagcaactgtgggtttaccatcaccagcgccgactacgacagggtgctggagaagctgaagaagacagcaacaggctggatgaccacaattaacggcaaggagctgaaggtggagggccagattacctactacaacagatacaagagacagaacgtagtcaaggacctgtccgtcgagctggatagactgagcgaagaatctgtgaacaacgacatctcctcctggacaaagggcagaagcggagaagctctgagcctcctgaagaaaagattctcccatagacccgtgcaggagaagttcgtgtgcctgaactgcggcttcgagacacacgcagccgagcaagccgccctgaacatcgccagatcctggctgttcctgcggagccaggagtacaagaaataccagacaaacaagacaaccggcaacaccgataagagagccttcgtcgagacctggcagtccttttaccggaagaagcttaaggaggtgtggaaacctgccgtgcggtctggcggatctggcggaggctccttctaaagcccctatcacattcggcgacctggccatctacttcagccaggaggaatgggagtggctgagccccatccagaaggacctgtacgaggacgtgatgctggaaaactacagaaatctggtgtccctgggcctcagctttagacgccccaacgtgatcaccctgctggaaaagggcaaggccccatggatggtcgagcctgctagacggcggagaggacctgatagcggcagcaaggtgggatctggctccggcagcggccccaagaaaaagagaaaagtctaagctgccttctgcggggcttgccttctggccatgcccttcttctctcccttgcacctgtacctcttggtctttgaataaagcctgagtaggaaggctagcaaaaaaaaaaaaaaaaaaaaaaaaaaaaaaaaaaaaaaaaaaaaaaaaaaaaaaaaaaaaaaaaaaaaaaaaaaaaaaaa

SEQ ID NO: 18505 - RNA, 9485 nt, synthetic construct
  source 1..9485: mol_type = other RNA
aggaaataagagagaaaagaagagtaagaagaaatataagagccaccatggcccctaagaagaagcgtaaagtgagccggatggaacgcctcgtctacgaggtgcggcagaagtgcagaaacatcgaggacatctgcatctcctgcggatctctgaacgtgaccctggagcacccactgttcatcggcggcatgtgccagaactgtaaaaactgttttctggagtgtgcctatcaatacgacgatgacggctaccagagctactgcaccatctgttgcggcggaagagaggtgctgatgtgtggaaataacaactgctgccggtgcttctgcgtggaatgcgtggacctgctggtgggccccggcgccgcccaggccgctattaaggaagatccttggaactgctacatgtgcggccacaagggcacatacggcctgctgagacggagagaggactggcctagcagactgcagatgttcttcgccaataaccacgaccaggagttcgacccccctaaggtgtaccctcccgtccccgccgagaagagaaagcccatccgggtcctgagcctgttcgatggcatcgccaccggtctgctggtgctgaaggacctgggcatccaggtggataggtacattgcctccgaggtgtgcgaggactccatcaccgtgggaatggtgcgtcatcagggcaagatcatgtacgtgggcgacgtgcggagcgtgacacagaagcatatccaggagtggggccctttcgacctggtgatcggcggcagcccttgcaatgacctgagcatcgtgaacccagcccggaagggcctgtacgagggaaccggcagactgttcttcgagttttacagactgctgcacgacgcccggcctaaggaaggcgacgaccggcccttcttttggctgttcgagaatgtggtggccatgggagtcagcgacaagcgggatattagccggttcctggagagcaaccccgtgatgatcgatgccaaggaagtgagcgccgcccaccgggccagatacttctggggcaatctgcctggcatgaacagacccctggccagcaccgtgaacgacaagctggagctgcaggagtgcctggagcacggccggatcgccaagttcagcaaggtgagaaccatcaccacccgaagcaacagcatcaaacaaggcaaggaccagcactttcctgtgttcatgaacgagaaggaggacatcctgtggtgtaccgagatggagagagtgttcgggttcccagtccactacacagatgtcagcaacatgtctagactggccagacagagactgctgggaagaagctggtccgtccctgtgatcagacacctgttcgcccctctgaaggagtacttcgcctgcgtgagcagcggcaacagcaacgccaacagccggggccccagcttctctagcggcctggtgccactgtccctgagagggagccacatgggccccatggagatctacaaaaccgtgagcgcctggaagcggcagcctgtgcgcgtgctgagcctgtttcggaatatcgataaagtcctgaaaagcctgggattcctggagagcggctctggctccggcggtggcaccctgaagtacgtggaggatgtgacaaacgtggtcagacgggatgtggagaagtggggccccttcgatctggtgtacggcagcacccaacccctgggcagctcttgtgaccggtgccctggctggtacatgtttcagttccaccggatcctgcagtacgccctgccgagacaggagtcccagcggccattcttttggattttcatggacaacttgctgctgaccgaggatgaccaggaaactaccactcggttcctgcagaccgaagccgtgaccctgcaggacgtgagaggccgggactaccagaacgccatgcgggtgtggtccaacatccctggactgaaaagcaagcacgcacctctgacccctaaagaagaggagtacctgcaggcccaggtgcggagcagaagcaagctggacgcccctaaggtggatctgctggtgaagaattgcctcctgcccctgagagagtacttcaagtatttcagccagaatagtctgcccctgggaggcagcggcggcggcgccctggtgacatttgaggacgtcgccgtgcggttcacccaggaggaatgggctctgctggatccttctcagaaaatcctgtaccgggacgtgatgagagagacataccggaatctgacctccgtgggcatcaactgggaatgttgggaccttgaagcctgcttcagaagcctgggaagaaacctgagagtgcaggtggtgaagagaaagtgcgagctgaccaacagcggcccctgcgccgagggcggcccaagcagcggcgcccctcctcccagcggcggcagcccagccggctccccaacctctaccgaggagggcacctctgagtccgccacccccgagagcggccctggcacctccaccgagcccagcgagggcagcgcacccggcagccctgccggcagccccacctccacagaggagggaaccagcaccgagcccagcgaaggcagcgccccaggcaccagcaccgagcctagtgagcaggagattaaacggatcaacaagatcagaagaagacttgtgaaagacagcaacaccaagaaggccggcaagacaggccccatgaaaaccctgctggttagagtgatgacacccgatctgagagagcggctggaaaacctgagaaagaagcctgaaaatatcccccagcccatcagcaatacatctagagccaacctgaataagctgctgaccgattacaccgaaatgaagaaggcgatcctgcatgtgtactgggaagagttccagaaggaccctgtgggcctgatgagccgggtggcccagcctgccagcaagaagatcgatcagaacaagctgaaacctgagatggacgagaagggcaacctgaccaccgccggctttgcctgctctcagtgtggccagcccctgttcgtgtacaagctggagcaggtgtctgagaagggcaaggcttacaccaactacttcggacggtgcaatgtggccgagcacgaaaagctgatcctgctggcccagctgaagcccgagaaggatagcgacgaagccgtgacatatagcctgggaaagtttgggcagagggccctggatttctacagcattcatgtgaccaaggagtccacccaccccgtgaagcccctggcccagatcgccggaaacagatacgcctccggacctgtgggaaaggccctgagcgacgcatgtatgggcacaatcgcctccttcctgtctaagtaccaggacatcatcatcgaacaccagaaggtggtgaagggcaaccagaagagactggagagcctgcgggagctggccggcaaggaaaacctggaataccctagcgtgaccctgccacctcagcctcacaccaaggagggcgttgatgcctacaacgaagtgatcgcccgggtgcgaatgtgggtgaacctgaacctgtggcagaagctgaagctaagcagagatgatgccaagcctctgctgagactgaagggattcccttcctttcctctggtcgagagacaggccaacgaagtggactggtgggacatggtgtgtaacgtgaagaagctgatcaacgagaaaaaggaggatggcaaggtgttttggcagaatctggctggctacaagagacaggaagccctgagaccatacctgagcagcgaggaagatcggaagaagggaaagaaattcgctcggtaccagctgggcgacctgctgctgcacctggaaaagaagcacggcgaggactggggaaaggtgtacgacgaggcctgggagcggattgacaagaaagtggaaggcctgagcaagcacatcaagctggaagaggaacggagaagcgaggacgcccagagcaaggccgccctgaccgactggctgcgggctaaggccagcttcgtgatcgagggcctgaaggaggccgacaaggacgagttctgcagatgcgagctgaagctgcagaagtggtacggggacctgcggggaaagcccttcgccatcgaagccgagaacagcatcctggacatcagcggcttcagcaagcagtacaactgtgccttcatctggcagaaggacggcgtgaagaagctgaacctgtacctgatcatcaactacttcaagggcggcaagctgcggttcaagaagatcaaacctgaagccttcgaagccaacagattctacaccgtgatcaacaaaaagagcggcgagatcgtgcccatggaggtgaacttcaacttcgacgaccccaacctgatcatcctgcctctggcctttggcaagagacagggcagagaattcatctggaacgacctgctgtccctggaaaccggcagcctgaagctggccaacggaagagtgatcgagaagacactgtacaacagaagaacccggcaggatgagcctgccctgttcgtggccctgaccttcgagcggcgggaggtcctggactcctccaatatcaaaccaatgaacctgatcggcgtggcaagaggcgaaaacatccccgccgtgatcgccctgaccgaccccgagggctgcccactgagccggtttaaggatagcctgggaaacccaacccacatcctgagaatcggcgagagctataaggagaagcagcggaccatccaggccaagaaggaggtggagcagcggagagccggcggctacagccggaagtacgccagcaaagccaagaatctggcagacgatatggtgagaaacaccgctagagatctgctgtactacgccgtgacccaggatgccatgctgatcttcgccaacctgagccggggcttcggccggcagggcaagcggaccttcatggccgagagacagtacacacggatggaggactggctgaccgccaagctggcctacgagggcctgagcaagacctacctgtccaagacactggcccagtacacctccaagacatgcagcaactgtgggtttaccatcaccagcgccgactacgacagggtgctggagaagctgaagaagacagcaacaggctggatgaccacaattaacggcaaggagctgaaggtggagggccagattacctactacaacagatacaagagacagaacgtagtcaaggacctgtccgtcgagctggatagactgagcgaagaatctgtgaacaacgacatctcctcctggacaaagggcagaagcggagaagctctgagcctcctgaagaaaagattctcccatagacccgtgcaggagaagttcgtgtgcctgaactgcggcttcgagacacacgcagccgagcaagccgccctgaacatcgccagatcctggctgttcctgcggagccaggagtacaagaaataccagacaaacaagacaaccggcaacaccgataagagagccttcgtcgagacctggcagtccttttaccggaagaagcttaaggaggtgtggaaacctgccgtgcggtctggcggatctggcggaggctcctctacacctgtgaccttcgaggatgtggtggtctacttcaccgccgctgagtgggtgcacctgacaaactggcaaagagatttttatcaggccgtgatgatggaaacctacgagctggtggccagcgtggctggcgacggcgttccaatggccgaggacgaggaaggcggagtggaaagacccgtgtggcagtacatccccagaggcaagcggcggagaaagacccctcagcctcgcgccgacggcggcccaagcagcggcgcccctcctcccagcggcggcagcccagccggctccccaacctctaccgaggagggcacctctgagtccgccacccccgagagcggccctggcacctccaccgagcccagcgagggcagcgcacccggcagccctgccggcagccccacctccacagaggagggaaccagcaccgagcccagcgaaggcagcgccccaggcaccagcaccgagcctagtgagcaggagattaaacggatcaacaagatcagaagaagacttgtgaaagacagcaacaccaagaaggccggcaagacaggccccatgaaaaccctgctggttagagtgatgacacccgatctgagagagcggctggaaaacctgagaaagaagcctgaaaatatcccccagcccatcagcaatacatctagagccaacctgaataagctgctgaccgattacaccgaaatgaagaaggcgatcctgcatgtgtactgggaagagttccagaaggaccctgtgggcctgatgagccgggtggcccagcctgccagcaagaagatcgatcagaacaagctgaaacctgagatggacgagaagggcaacctgaccaccgccggctttgcctgctctcagtgtggccagcccctgttcgtgtacaagctggagcaggtgtctgagaagggcaaggcttacaccaactacttcggacggtgcaatgtggccgagcacgaaaagctgatcctgctggcccagctgaagcccgagaaggatagcgacgaagccgtgacatatagcctgggaaagtttgggcagagggccctggatttctacagcattcatgtgaccaaggagtccacccaccccgtgaagcccctggcccagatcgccggaaacagatacgcctccggacctgtgggaaaggccctgagcgacgcatgtatgggcacaatcgcctccttcctgtctaagtaccaggacatcatcatcgaacaccagaaggtggtgaagggcaaccagaagagactggagagcctgcgggagctggccggcaaggaaaacctggaataccctagcgtgaccctgccacctcagcctcacaccaaggagggcgttgatgcctacaacgaagtgatcgcccgggtgcgaatgtgggtgaacctgaacctgtggcagaagctgaagctaagcagagatgatgccaagcctctgctgagactgaagggattcccttcctttcctctggtcgagagacaggccaacgaagtggactggtgggacatggtgtgtaacgtgaagaagctgatcaacgagaaaaaggaggatggcaaggtgttttggcagaatctggctggctacaagagacaggaagccctgagaccatacctgagcagcgaggaagatcggaagaagggaaagaaattcgctcggtaccagctgggcgacctgctgctgcacctggaaaagaagcacggcgaggactggggaaaggtgtacgacgaggcctgggagcggattgacaagaaagtggaaggcctgagcaagcacatcaagctggaagaggaacggagaagcgaggacgcccagagcaaggccgccctgaccgactggctgcgggctaaggccagcttcgtgatcgagggcctgaaggaggccgacaaggacgagttctgcagatgcgagctgaagctgcagaagtggtacggggacctgcggggaaagcccttcgccatcgaagccgagaacagcatcctggacatcagcggcttcagcaagcagtacaactgtgccttcatctggcagaaggacggcgtgaagaagctgaacctgtacctgatcatcaactacttcaagggcggcaagctgcggttcaagaagatcaaacctgaagccttcgaagccaacagattctacaccgtgatcaacaaaaagagcggcgagatcgtgcccatggaggtgaacttcaacttcgacgaccccaacctgatcatcctgcctctggcctttggcaagagacagggcagagaattcatctggaacgacctgctgtccctggaaaccggcagcctgaagctggccaacggaagagtgatcgagaagacactgtacaacagaagaacccggcaggatgagcctgccctgttcgtggccctgaccttcgagcggcgggaggtcctggactcctccaatatcaaaccaatgaacctgatcggcgtggcaagaggcgaaaacatccccgccgtgatcgccctgaccgaccccgagggctgcccactgagccggtttaaggatagcctgggaaacccaacccacatcctgagaatcggcgagagctataaggagaagcagcggaccatccaggccaagaaggaggtggagcagcggagagccggcggctacagccggaagtacgccagcaaagccaagaatctggcagacgatatggtgagaaacaccgctagagatctgctgtactacgccgtgacccaggatgccatgctgatcttcgccaacctgagccggggcttcggccggcagggcaagcggaccttcatggccgagagacagtacacacggatggaggactggctgaccgccaagctggcctacgagggcctgagcaagacctacctgtccaagacactggcccagtacacctccaagacatgcagcaactgtgggtttaccatcaccagcgccgactacgacagggtgctggagaagctgaagaagacagcaacaggctggatgaccacaattaacggcaaggagctgaaggtggagggccagattacctactacaacagatacaagagacagaacgtagtcaaggacctgtccgtcgagctggatagactgagcgaagaatctgtgaacaacgacatctcctcctggacaaagggcagaagcggagaagctctgagcctcctgaagaaaagattctcccatagacccgtgcaggagaagttcgtgtgcctgaactgcggcttcgagacacacgcagccgagcaagccgccctgaacatcgccagatcctggctgttcctgcggagccaggagtacaagaaataccagacaaacaagacaaccggcaacaccgataagagagccttcgtcgagacctggcagtccttttaccggaagaagcttaaggaggtgtggaaacctgccgtgcggtctggcggatctggcggaggctcctgagatgggcctgctgacattcagagacatcgctatcgagttcagcctggaggaatggcaatgtctggactgcgcccagagaaatctgtacagagatgtgatgctggaaaactaccggaacctggtgtctctgggcatcgccgtgtccaagcccgacctgatcacctgcctcgagcagaacaaggaaagccagaacatcaagcggaacaaaatggtcgccaagcaccctgtgatgcacagccacggatctggctccggcagcggccccaagaaaaagagaaaagtctaagctgccttctgcggggcttgccttctggccatgcccttcttctctcccttgcacctgtacctcttggtctttgaataaagcctgagtaggaaggctagcaaaaaaaaaaaaaaaaaaaaaaaaaaaaaaaaaaaaaaaaaaaaaaaaaaaaaaaaaaaaaaaaaaaaaaaaaaaaaaaa

SEQ ID NO: 18506 - RNA, 9485 nt, synthetic construct
  source 1..9485: mol_type = other RNA
aggaaataagagagaaaagaagagtaagaagaaatataagagccaccatggcccctaagaagaagcgtaaagtgagccggatggaacgcctcgtctacgaggtgcggcagaagtgcagaaacatcgaggacatctgcatctcctgcggatctctgaacgtgaccctggagcacccactgttcatcggcggcatgtgccagaactgtaaaaactgttttctggagtgtgcctatcaatacgacgatgacggctaccagagctactgcaccatctgttgcggcggaagagaggtgctgatgtgtggaaataacaactgctgccggtgcttctgcgtggaatgcgtggacctgctggtgggccccggcgccgcccaggccgctattaaggaagatccttggaactgctacatgtgcggccacaagggcacatacggcctgctgagacggagagaggactggcctagcagactgcagatgttcttcgccaataaccacgaccaggagttcgacccccctaaggtgtaccctcccgtccccgccgagaagagaaagcccatccgggtcctgagcctgttcgatggcatcgccaccggtctgctggtgctgaaggacctgggcatccaggtggataggtacattgcctccgaggtgtgcgaggactccatcaccgtgggaatggtgcgtcatcagggcaagatcatgtacgtgggcgacgtgcggagcgtgacacagaagcatatccaggagtggggccctttcgacctggtgatcggcggcagcccttgcaatgacctgagcatcgtgaacccagcccggaagggcctgtacgagggaaccggcagactgttcttcgagttttacagactgctgcacgacgcccggcctaaggaaggcgacgaccggcccttcttttggctgttcgagaatgtggtggccatgggagtcagcgacaagcgggatattagccggttcctggagagcaaccccgtgatgatcgatgccaaggaagtgagcgccgcccaccgggccagatacttctggggcaatctgcctggcatgaacagacccctggccagcaccgtgaacgacaagctggagctgcaggagtgcctggagcacggccggatcgccaagttcagcaaggtgagaaccatcaccacccgaagcaacagcatcaaacaaggcaaggaccagcactttcctgtgttcatgaacgagaaggaggacatcctgtggtgtaccgagatggagagagtgttcgggttcccagtccactacacagatgtcagcaacatgtctagactggccagacagagactgctgggaagaagctggtccgtccctgtgatcagacacctgttcgcccctctgaaggagtacttcgcctgcgtgagcagcggcaacagcaacgccaacagccggggccccagcttctctagcggcctggtgccactgtccctgagagggagccacatgggccccatggagatctacaaaaccgtgagcgcctggaagcggcagcctgtgcgcgtgctgagcctgtttcggaatatcgataaagtcctgaaaagcctgggattcctggagagcggctctggctccggcggtggcaccctgaagtacgtggaggatgtgacaaacgtggtcagacgggatgtggagaagtggggccccttcgatctggtgtacggcagcacccaacccctgggcagctcttgtgaccggtgccctggctggtacatgtttcagttccaccggatcctgcagtacgccctgccgagacaggagtcccagcggccattcttttggattttcatggacaacttgctgctgaccgaggatgaccaggaaactaccactcggttcctgcagaccgaagccgtgaccctgcaggacgtgagaggccgggactaccagaacgccatgcgggtgtggtccaacatccctggactgaaaagcaagcacgcacctctgacccctaaagaagaggagtacctgcaggcccaggtgcggagcagaagcaagctggacgcccctaaggtggatctgctggtgaagaattgcctcctgcccctgagagagtacttcaagtatttcagccagaatagtctgcccctgggaggcagcggcggcggcgccctggtgacatttgaggacgtcgccgtgcggttcacccaggaggaatgggctctgctggatccttctcagaaaatcctgtaccgggacgtgatgagagagacataccggaatctgacctccgtgggcatcaactgggaatgttgggaccttgaagcctgcttcagaagcctgggaagaaacctgagagtgcaggtggtgaagagaaagtgcgagctgaccaacagcggcccctgcgccgagggcggcccaagcagcggcgcccctcctcccagcggcggcagcccagccggctccccaacctctaccgaggagggcacctctgagtccgccacccccgagagcggccctggcacctccaccgagcccagcgagggcagcgcacccggcagccctgccggcagccccacctccacagaggagggaaccagcaccgagcccagcgaaggcagcgccccaggcaccagcaccgagcctagtgagcaggagattaaacggatcaacaagatcagaagaagacttgtgaaagacagcaacaccaagaaggccggcaagacaggccccatgaaaaccctgctggttagagtgatgacacccgatctgagagagcggctggaaaacctgagaaagaagcctgaaaatatcccccagcccatcagcaatacatctagagccaacctgaataagctgctgaccgattacaccgaaatgaagaaggcgatcctgcatgtgtactgggaagagttccagaaggaccctgtgggcctgatgagccgggtggcccagcctgccagcaagaagatcgatcagaacaagctgaaacctgagatggacgagaagggcaacctgaccaccgccggctttgcctgctctcagtgtggccagcccctgttcgtgtacaagctggagcaggtgtctgagaagggcaaggcttacaccaactacttcggacggtgcaatgtggccgagcacgaaaagctgatcctgctggcccagctgaagcccgagaaggatagcgacgaagccgtgacatatagcctgggaaagtttgggcagagggccctggatttctacagcattcatgtgaccaaggagtccacccaccccgtgaagcccctggcccagatcgccggaaacagatacgcctccggacctgtgggaaaggccctgagcgacgcatgtatgggcacaatcgcctccttcctgtctaagtaccaggacatcatcatcgaacaccagaaggtggtgaagggcaaccagaagagactggagagcctgcgggagctggccggcaaggaaaacctggaataccctagcgtgaccctgccacctcagcctcacaccaaggagggcgttgatgcctacaacgaagtgatcgcccgggtgcgaatgtgggtgaacctgaacctgtggcagaagctgaagctaagcagagatgatgccaagcctctgctgagactgaagggattcccttcctttcctctggtcgagagacaggccaacgaagtggactggtgggacatggtgtgtaacgtgaagaagctgatcaacgagaaaaaggaggatggcaaggtgttttggcagaatctggctggctacaagagacaggaagccctgagaccatacctgagcagcgaggaagatcggaagaagggaaagaaattcgctcggtaccagctgggcgacctgctgctgcacctggaaaagaagcacggcgaggactggggaaaggtgtacgacgaggcctgggagcggattgacaagaaagtggaaggcctgagcaagcacatcaagctggaagaggaacggagaagcgaggacgcccagagcaaggccgccctgaccgactggctgcgggctaaggccagcttcgtgatcgagggcctgaaggaggccgacaaggacgagttctgcagatgcgagctgaagctgcagaagtggtacggggacctgcggggaaagcccttcgccatcgaagccgagaacagcatcctggacatcagcggcttcagcaagcagtacaactgtgccttcatctggcagaaggacggcgtgaagaagctgaacctgtacctgatcatcaactacttcaagggcggcaagctgcggttcaagaagatcaaacctgaagccttcgaagccaacagattctacaccgtgatcaacaaaaagagcggcgagatcgtgcccatggaggtgaacttcaacttcgacgaccccaacctgatcatcctgcctctggcctttggcaagagacagggcagagaattcatctggaacgacctgctgtccctggaaaccggcagcctgaagctggccaacggaagagtgatcgagaagacactgtacaacagaagaacccggcaggatgagcctgccctgttcgtggccctgaccttcgagcggcgggaggtcctggactcctccaatatcaaaccaatgaacctgatcggcgtggcaagaggcgaaaacatccccgccgtgatcgccctgaccgaccccgagggctgcccactgagccggtttaaggatagcctgggaaacccaacccacatcctgagaatcggcgagagctataaggagaagcagcggaccatccaggccaagaaggaggtggagcagcggagagccggcggctacagccggaagtacgccagcaaagccaagaatctggcagacgatatggtgagaaacaccgctagagatctgctgtactacgccgtgacccaggatgccatgctgatcttcgccaacctgagccggggcttcggccggcagggcaagcggaccttcatggccgagagacagtacacacggatggaggactggctgaccgccaagctggcctacgagggcctgagcaagacctacctgtccaagacactggcccagtacacctccaagacatgcagcaactgtgggtttaccatcaccagcgccgactacgacagggtgctggagaagctgaagaagacagcaacaggctggatgaccacaattaacggcaaggagctgaaggtggagggccagattacctactacaacagatacaagagacagaacgtagtcaaggacctgtccgtcgagctggatagactgagcgaagaatctgtgaacaacgacatctcctcctggacaaagggcagaagcggagaagctctgagcctcctgaagaaaagattctcccatagacccgtgcaggagaagttcgtgtgcctgaactgcggcttcgagacacacgcagccgagcaagccgccctgaacatcgccagatcctggctgttcctgcggagccaggagtacaagaaataccagacaaacaagacaaccggcaacaccgataagagagccttcgtcgagacctggcagtccttttaccggaagaagcttaaggaggtgtggaaacctgccgtgcggtctggcggatctggcggaggctcctctacacctgtgaccttcgaggatgtggtggtctacttcaccgccgctgagtgggtgcacctgacaaactggcaaagagatttttatcaggccgtgatgatggaaacctacgagctggtggccagcgtggctggcgacggcgttccaatggccgaggacgaggaaggcggagtggaaagacccgtgtggcagtacatccccagaggcaagcggcggagaaagacccctcagcctcgcgccgacggcggcccaagcagcggcgcccctcctcccagcggcggcagcccagccggctccccaacctctaccgaggagggcacctctgagtccgccacccccgagagcggccctggcacctccaccgagcccagcgagggcagcgcacccggcagccctgccggcagccccacctccacagaggagggaaccagcaccgagcccagcgaaggcagcgccccaggcaccagcaccgagcctagtgagcaggagattaaacggatcaacaagatcagaagaagacttgtgaaagacagcaacaccaagaaggccggcaagacaggccccatgaaaaccctgctggttagagtgatgacacccgatctgagagagcggctggaaaacctgagaaagaagcctgaaaatatcccccagcccatcagcaatacatctagagccaacctgaataagctgctgaccgattacaccgaaatgaagaaggcgatcctgcatgtgtactgggaagagttccagaaggaccctgtgggcctgatgagccgggtggcccagcctgccagcaagaagatcgatcagaacaagctgaaacctgagatggacgagaagggcaacctgaccaccgccggctttgcctgctctcagtgtggccagcccctgttcgtgtacaagctggagcaggtgtctgagaagggcaaggcttacaccaactacttcggacggtgcaatgtggccgagcacgaaaagctgatcctgctggcccagctgaagcccgagaaggatagcgacgaagccgtgacatatagcctgggaaagtttgggcagagggccctggatttctacagcattcatgtgaccaaggagtccacccaccccgtgaagcccctggcccagatcgccggaaacagatacgcctccggacctgtgggaaaggccctgagcgacgcatgtatgggcacaatcgcctccttcctgtctaagtaccaggacatcatcatcgaacaccagaaggtggtgaagggcaaccagaagagactggagagcctgcgggagctggccggcaaggaaaacctggaataccctagcgtgaccctgccacctcagcctcacaccaaggagggcgttgatgcctacaacgaagtgatcgcccgggtgcgaatgtgggtgaacctgaacctgtggcagaagctgaagctaagcagagatgatgccaagcctctgctgagactgaagggattcccttcctttcctctggtcgagagacaggccaacgaagtggactggtgggacatggtgtgtaacgtgaagaagctgatcaacgagaaaaaggaggatggcaaggtgttttggcagaatctggctggctacaagagacaggaagccctgagaccatacctgagcagcgaggaagatcggaagaagggaaagaaattcgctcggtaccagctgggcgacctgctgctgcacctggaaaagaagcacggcgaggactggggaaaggtgtacgacgaggcctgggagcggattgacaagaaagtggaaggcctgagcaagcacatcaagctggaagaggaacggagaagcgaggacgcccagagcaaggccgccctgaccgactggctgcgggctaaggccagcttcgtgatcgagggcctgaaggaggccgacaaggacgagttctgcagatgcgagctgaagctgcagaagtggtacggggacctgcggggaaagcccttcgccatcgaagccgagaacagcatcctggacatcagcggcttcagcaagcagtacaactgtgccttcatctggcagaaggacggcgtgaagaagctgaacctgtacctgatcatcaactacttcaagggcggcaagctgcggttcaagaagatcaaacctgaagccttcgaagccaacagattctacaccgtgatcaacaaaaagagcggcgagatcgtgcccatggaggtgaacttcaacttcgacgaccccaacctgatcatcctgcctctggcctttggcaagagacagggcagagaattcatctggaacgacctgctgtccctggaaaccggcagcctgaagctggccaacggaagagtgatcgagaagacactgtacaacagaagaacccggcaggatgagcctgccctgttcgtggccctgaccttcgagcggcgggaggtcctggactcctccaatatcaaaccaatgaacctgatcggcgtggcaagaggcgaaaacatccccgccgtgatcgccctgaccgaccccgagggctgcccactgagccggtttaaggatagcctgggaaacccaacccacatcctgagaatcggcgagagctataaggagaagcagcggaccatccaggccaagaaggaggtggagcagcggagagccggcggctacagccggaagtacgccagcaaagccaagaatctggcagacgatatggtgagaaacaccgctagagatctgctgtactacgccgtgacccaggatgccatgctgatcttcgccaacctgagccggggcttcggccggcagggcaagcggaccttcatggccgagagacagtacacacggatggaggactggctgaccgccaagctggcctacgagggcctgagcaagacctacctgtccaagacactggcccagtacacctccaagacatgcagcaactgtgggtttaccatcaccagcgccgactacgacagggtgctggagaagctgaagaagacagcaacaggctggatgaccacaattaacggcaaggagctgaaggtggagggccagattacctactacaacagatacaagagacagaacgtagtcaaggacctgtccgtcgagctggatagactgagcgaagaatctgtgaacaacgacatctcctcctggacaaagggcagaagcggagaagctctgagcctcctgaagaaaagattctcccatagacccgtgcaggagaagttcgtgtgcctgaactgcggcttcgagacacacgcagccgagcaagccgccctgaacatcgccagatcctggctgttcctgcggagccaggagtacaagaaataccagacaaacaagacaaccggcaacaccgataagagagccttcgtcgagacctggcagtccttttaccggaagaagcttaaggaggtgtggaaacctgccgtgcggtctggcggatctggcggaggctcctctgctgaccttcgaggacgtcgccgtgtccttcagcgaggaagaatgggagctgctcgatcctcctcagaaaaccctgtacaacgacgtgatgcaagagaactacgagacagtgatctctctgggcctgaagctgaagaacgacaccggaaatgatcagcccatcagcatcagcgccctggaaatgcaggccagcggcagcaaggtgctgcggaaggccagaatgaaagtggctcagaagacaggatctggctccggcagcggccccaagaaaaagagaaaagtctaagctgccttctgcggggcttgccttctggccatgcccttcttctctcccttgcacctgtacctcttggtctttgaataaagcctgagtaggaaggctagcaaaaaaaaaaaaaaaaaaaaaaaaaaaaaaaaaaaaaaaaaaaaaaaaaaaaaaaaaaaaaaaaaaaaaaaaaaaaaaaa

SEQ ID NO: 18507 - RNA, 9485 nt, synthetic construct
  source 1..9485: mol_type = other RNA
aggaaataagagagaaaagaagagtaagaagaaatataagagccaccatggcccctaagaagaagcgtaaagtgagccggatggaacgcctcgtctacgaggtgcggcagaagtgcagaaacatcgaggacatctgcatctcctgcggatctctgaacgtgaccctggagcacccactgttcatcggcggcatgtgccagaactgtaaaaactgttttctggagtgtgcctatcaatacgacgatgacggctaccagagctactgcaccatctgttgcggcggaagagaggtgctgatgtgtggaaataacaactgctgccggtgcttctgcgtggaatgcgtggacctgctggtgggccccggcgccgcccaggccgctattaaggaagatccttggaactgctacatgtgcggccacaagggcacatacggcctgctgagacggagagaggactggcctagcagactgcagatgttcttcgccaataaccacgaccaggagttcgacccccctaaggtgtaccctcccgtccccgccgagaagagaaagcccatccgggtcctgagcctgttcgatggcatcgccaccggtctgctggtgctgaaggacctgggcatccaggtggataggtacattgcctccgaggtgtgcgaggactccatcaccgtgggaatggtgcgtcatcagggcaagatcatgtacgtgggcgacgtgcggagcgtgacacagaagcatatccaggagtggggccctttcgacctggtgatcggcggcagcccttgcaatgacctgagcatcgtgaacccagcccggaagggcctgtacgagggaaccggcagactgttcttcgagttttacagactgctgcacgacgcccggcctaaggaaggcgacgaccggcccttcttttggctgttcgagaatgtggtggccatgggagtcagcgacaagcgggatattagccggttcctggagagcaaccccgtgatgatcgatgccaaggaagtgagcgccgcccaccgggccagatacttctggggcaatctgcctggcatgaacagacccctggccagcaccgtgaacgacaagctggagctgcaggagtgcctggagcacggccggatcgccaagttcagcaaggtgagaaccatcaccacccgaagcaacagcatcaaacaaggcaaggaccagcactttcctgtgttcatgaacgagaaggaggacatcctgtggtgtaccgagatggagagagtgttcgggttcccagtccactacacagatgtcagcaacatgtctagactggccagacagagactgctgggaagaagctggtccgtccctgtgatcagacacctgttcgcccctctgaaggagtacttcgcctgcgtgagcagcggcaacagcaacgccaacagccggggccccagcttctctagcggcctggtgccactgtccctgagagggagccacatgggccccatggagatctacaaaaccgtgagcgcctggaagcggcagcctgtgcgcgtgctgagcctgtttcggaatatcgataaagtcctgaaaagcctgggattcctggagagcggctctggctccggcggtggcaccctgaagtacgtggaggatgtgacaaacgtggtcagacgggatgtggagaagtggggccccttcgatctggtgtacggcagcacccaacccctgggcagctcttgtgaccggtgccctggctggtacatgtttcagttccaccggatcctgcagtacgccctgccgagacaggagtcccagcggccattcttttggattttcatggacaacttgctgctgaccgaggatgaccaggaaactaccactcggttcctgcagaccgaagccgtgaccctgcaggacgtgagaggccgggactaccagaacgccatgcgggtgtggtccaacatccctggactgaaaagcaagcacgcacctctgacccctaaagaagaggagtacctgcaggcccaggtgcggagcagaagcaagctggacgcccctaaggtggatctgctggtgaagaattgcctcctgcccctgagagagtacttcaagtatttcagccagaatagtctgcccctgggaggcagcggcggcggcgccctggtgacatttgaggacgtcgccgtgcggttcacccaggaggaatgggctctgctggatccttctcagaaaatcctgtaccgggacgtgatgagagagacataccggaatctgacctccgtgggcatcaactgggaatgttgggaccttgaagcctgcttcagaagcctgggaagaaacctgagagtgcaggtggtgaagagaaagtgcgagctgaccaacagcggcccctgcgccgagggcggcccaagcagcggcgcccctcctcccagcggcggcagcccagccggctccccaacctctaccgaggagggcacctctgagtccgccacccccgagagcggccctggcacctccaccgagcccagcgagggcagcgcacccggcagccctgccggcagccccacctccacagaggagggaaccagcaccgagcccagcgaaggcagcgccccaggcaccagcaccgagcctagtgagcaggagattaaacggatcaacaagatcagaagaagacttgtgaaagacagcaacaccaagaaggccggcaagacaggccccatgaaaaccctgctggttagagtgatgacacccgatctgagagagcggctggaaaacctgagaaagaagcctgaaaatatcccccagcccatcagcaatacatctagagccaacctgaataagctgctgaccgattacaccgaaatgaagaaggcgatcctgcatgtgtactgggaagagttccagaaggaccctgtgggcctgatgagccgggtggcccagcctgccagcaagaagatcgatcagaacaagctgaaacctgagatggacgagaagggcaacctgaccaccgccggctttgcctgctctcagtgtggccagcccctgttcgtgtacaagctggagcaggtgtctgagaagggcaaggcttacaccaactacttcggacggtgcaatgtggccgagcacgaaaagctgatcctgctggcccagctgaagcccgagaaggatagcgacgaagccgtgacatatagcctgggaaagtttgggcagagggccctggatttctacagcattcatgtgaccaaggagtccacccaccccgtgaagcccctggcccagatcgccggaaacagatacgcctccggacctgtgggaaaggccctgagcgacgcatgtatgggcacaatcgcctccttcctgtctaagtaccaggacatcatcatcgaacaccagaaggtggtgaagggcaaccagaagagactggagagcctgcgggagctggccggcaaggaaaacctggaataccctagcgtgaccctgccacctcagcctcacaccaaggagggcgttgatgcctacaacgaagtgatcgcccgggtgcgaatgtgggtgaacctgaacctgtggcagaagctgaagctaagcagagatgatgccaagcctctgctgagactgaagggattcccttcctttcctctggtcgagagacaggccaacgaagtggactggtgggacatggtgtgtaacgtgaagaagctgatcaacgagaaaaaggaggatggcaaggtgttttggcagaatctggctggctacaagagacaggaagccctgagaccatacctgagcagcgaggaagatcggaagaagggaaagaaattcgctcggtaccagctgggcgacctgctgctgcacctggaaaagaagcacggcgaggactggggaaaggtgtacgacgaggcctgggagcggattgacaagaaagtggaaggcctgagcaagcacatcaagctggaagaggaacggagaagcgaggacgcccagagcaaggccgccctgaccgactggctgcgggctaaggccagcttcgtgatcgagggcctgaaggaggccgacaaggacgagttctgcagatgcgagctgaagctgcagaagtggtacggggacctgcggggaaagcccttcgccatcgaagccgagaacagcatcctggacatcagcggcttcagcaagcagtacaactgtgccttcatctggcagaaggacggcgtgaagaagctgaacctgtacctgatcatcaactacttcaagggcggcaagctgcggttcaagaagatcaaacctgaagccttcgaagccaacagattctacaccgtgatcaacaaaaagagcggcgagatcgtgcccatggaggtgaacttcaacttcgacgaccccaacctgatcatcctgcctctggcctttggcaagagacagggcagagaattcatctggaacgacctgctgtccctggaaaccggcagcctgaagctggccaacggaagagtgatcgagaagacactgtacaacagaagaacccggcaggatgagcctgccctgttcgtggccctgaccttcgagcggcgggaggtcctggactcctccaatatcaaaccaatgaacctgatcggcgtggcaagaggcgaaaacatccccgccgtgatcgccctgaccgaccccgagggctgcccactgagccggtttaaggatagcctgggaaacccaacccacatcctgagaatcggcgagagctataaggagaagcagcggaccatccaggccaagaaggaggtggagcagcggagagccggcggctacagccggaagtacgccagcaaagccaagaatctggcagacgatatggtgagaaacaccgctagagatctgctgtactacgccgtgacccaggatgccatgctgatcttcgccaacctgagccggggcttcggccggcagggcaagcggaccttcatggccgagagacagtacacacggatggaggactggctgaccgccaagctggcctacgagggcctgagcaagacctacctgtccaagacactggcccagtacacctccaagacatgcagcaactgtgggtttaccatcaccagcgccgactacgacagggtgctggagaagctgaagaagacagcaacaggctggatgaccacaattaacggcaaggagctgaaggtggagggccagattacctactacaacagatacaagagacagaacgtagtcaaggacctgtccgtcgagctggatagactgagcgaagaatctgtgaacaacgacatctcctcctggacaaagggcagaagcggagaagctctgagcctcctgaagaaaagattctcccatagacccgtgcaggagaagttcgtgtgcctgaactgcggcttcgagacacacgcagccgagcaagccgccctgaacatcgccagatcctggctgttcctgcggagccaggagtacaagaaataccagacaaacaagacaaccggcaacaccgataagagagccttcgtcgagacctggcagtccttttaccggaagaagcttaaggaggtgtggaaacctgccgtgcggtctggcggatctggcggaggctcccaggacgtggtgacattcaaggacgtcgccatctacttcagccctgaggaatgggtgcggctgagcgccggacagagagaactgtaccaggaggtgatgctggacaactacgagctggtgaccagcctggatagagagagcaaactgctgtataagatggaccccgaggaagaaagctgcgagggcgtgccatacagctctgccgacagcggcgcccctgatagctcctccacctctgcttgtggcggcccaagcagcggcgcccctcctcccagcggcggcagcccagccggctccccaacctctaccgaggagggcacctctgagtccgccacccccgagagcggccctggcacctccaccgagcccagcgagggcagcgcacccggcagccctgccggcagccccacctccacagaggagggaaccagcaccgagcccagcgaaggcagcgccccaggcaccagcaccgagcctagtgagcaggagattaaacggatcaacaagatcagaagaagacttgtgaaagacagcaacaccaagaaggccggcaagacaggccccatgaaaaccctgctggttagagtgatgacacccgatctgagagagcggctggaaaacctgagaaagaagcctgaaaatatcccccagcccatcagcaatacatctagagccaacctgaataagctgctgaccgattacaccgaaatgaagaaggcgatcctgcatgtgtactgggaagagttccagaaggaccctgtgggcctgatgagccgggtggcccagcctgccagcaagaagatcgatcagaacaagctgaaacctgagatggacgagaagggcaacctgaccaccgccggctttgcctgctctcagtgtggccagcccctgttcgtgtacaagctggagcaggtgtctgagaagggcaaggcttacaccaactacttcggacggtgcaatgtggccgagcacgaaaagctgatcctgctggcccagctgaagcccgagaaggatagcgacgaagccgtgacatatagcctgggaaagtttgggcagagggccctggatttctacagcattcatgtgaccaaggagtccacccaccccgtgaagcccctggcccagatcgccggaaacagatacgcctccggacctgtgggaaaggccctgagcgacgcatgtatgggcacaatcgcctccttcctgtctaagtaccaggacatcatcatcgaacaccagaaggtggtgaagggcaaccagaagagactggagagcctgcgggagctggccggcaaggaaaacctggaataccctagcgtgaccctgccacctcagcctcacaccaaggagggcgttgatgcctacaacgaagtgatcgcccgggtgcgaatgtgggtgaacctgaacctgtggcagaagctgaagctaagcagagatgatgccaagcctctgctgagactgaagggattcccttcctttcctctggtcgagagacaggccaacgaagtggactggtgggacatggtgtgtaacgtgaagaagctgatcaacgagaaaaaggaggatggcaaggtgttttggcagaatctggctggctacaagagacaggaagccctgagaccatacctgagcagcgaggaagatcggaagaagggaaagaaattcgctcggtaccagctgggcgacctgctgctgcacctggaaaagaagcacggcgaggactggggaaaggtgtacgacgaggcctgggagcggattgacaagaaagtggaaggcctgagcaagcacatcaagctggaagaggaacggagaagcgaggacgcccagagcaaggccgccctgaccgactggctgcgggctaaggccagcttcgtgatcgagggcctgaaggaggccgacaaggacgagttctgcagatgcgagctgaagctgcagaagtggtacggggacctgcggggaaagcccttcgccatcgaagccgagaacagcatcctggacatcagcggcttcagcaagcagtacaactgtgccttcatctggcagaaggacggcgtgaagaagctgaacctgtacctgatcatcaactacttcaagggcggcaagctgcggttcaagaagatcaaacctgaagccttcgaagccaacagattctacaccgtgatcaacaaaaagagcggcgagatcgtgcccatggaggtgaacttcaacttcgacgaccccaacctgatcatcctgcctctggcctttggcaagagacagggcagagaattcatctggaacgacctgctgtccctggaaaccggcagcctgaagctggccaacggaagagtgatcgagaagacactgtacaacagaagaacccggcaggatgagcctgccctgttcgtggccctgaccttcgagcggcgggaggtcctggactcctccaatatcaaaccaatgaacctgatcggcgtggcaagaggcgaaaacatccccgccgtgatcgccctgaccgaccccgagggctgcccactgagccggtttaaggatagcctgggaaacccaacccacatcctgagaatcggcgagagctataaggagaagcagcggaccatccaggccaagaaggaggtggagcagcggagagccggcggctacagccggaagtacgccagcaaagccaagaatctggcagacgatatggtgagaaacaccgctagagatctgctgtactacgccgtgacccaggatgccatgctgatcttcgccaacctgagccggggcttcggccggcagggcaagcggaccttcatggccgagagacagtacacacggatggaggactggctgaccgccaagctggcctacgagggcctgagcaagacctacctgtccaagacactggcccagtacacctccaagacatgcagcaactgtgggtttaccatcaccagcgccgactacgacagggtgctggagaagctgaagaagacagcaacaggctggatgaccacaattaacggcaaggagctgaaggtggagggccagattacctactacaacagatacaagagacagaacgtagtcaaggacctgtccgtcgagctggatagactgagcgaagaatctgtgaacaacgacatctcctcctggacaaagggcagaagcggagaagctctgagcctcctgaagaaaagattctcccatagacccgtgcaggagaagttcgtgtgcctgaactgcggcttcgagacacacgcagccgagcaagccgccctgaacatcgccagatcctggctgttcctgcggagccaggagtacaagaaataccagacaaacaagacaaccggcaacaccgataagagagccttcgtcgagacctggcagtccttttaccggaagaagcttaaggaggtgtggaaacctgccgtgcggtctggcggatctggcggaggctcctgccctggtgacatttgaggacgtcgccgtgcggttcacccaggaggaatgggctctgctggatccttctcagaaaatcctgtaccgggacgtgatgagagagacataccggaatctgacctccgtgggcatcaactgggaatgttgggaccttgaagcctgcttcagaagcctgggaagaaacctgagagtgcaggtggtgaagagaaagtgcgagctgaccaacagcggcccctgcgccgagggatctggctccggcagcggccccaagaaaaagagaaaagtctaagctgccttctgcggggcttgccttctggccatgcccttcttctctcccttgcacctgtacctcttggtctttgaataaagcctgagtaggaaggctagcaaaaaaaaaaaaaaaaaaaaaaaaaaaaaaaaaaaaaaaaaaaaaaaaaaaaaaaaaaaaaaaaaaaaaaaaaaaaaaaa

SEQ ID NO: 18508 - RNA, 9485 nt, synthetic construct
  source 1..9485: mol_type = other RNA
aggaaataagagagaaaagaagagtaagaagaaatataagagccaccatggcccctaagaagaagcgtaaagtgagccggatggaacgcctcgtctacgaggtgcggcagaagtgcagaaacatcgaggacatctgcatctcctgcggatctctgaacgtgaccctggagcacccactgttcatcggcggcatgtgccagaactgtaaaaactgttttctggagtgtgcctatcaatacgacgatgacggctaccagagctactgcaccatctgttgcggcggaagagaggtgctgatgtgtggaaataacaactgctgccggtgcttctgcgtggaatgcgtggacctgctggtgggccccggcgccgcccaggccgctattaaggaagatccttggaactgctacatgtgcggccacaagggcacatacggcctgctgagacggagagaggactggcctagcagactgcagatgttcttcgccaataaccacgaccaggagttcgacccccctaaggtgtaccctcccgtccccgccgagaagagaaagcccatccgggtcctgagcctgttcgatggcatcgccaccggtctgctggtgctgaaggacctgggcatccaggtggataggtacattgcctccgaggtgtgcgaggactccatcaccgtgggaatggtgcgtcatcagggcaagatcatgtacgtgggcgacgtgcggagcgtgacacagaagcatatccaggagtggggccctttcgacctggtgatcggcggcagcccttgcaatgacctgagcatcgtgaacccagcccggaagggcctgtacgagggaaccggcagactgttcttcgagttttacagactgctgcacgacgcccggcctaaggaaggcgacgaccggcccttcttttggctgttcgagaatgtggtggccatgggagtcagcgacaagcgggatattagccggttcctggagagcaaccccgtgatgatcgatgccaaggaagtgagcgccgcccaccgggccagatacttctggggcaatctgcctggcatgaacagacccctggccagcaccgtgaacgacaagctggagctgcaggagtgcctggagcacggccggatcgccaagttcagcaaggtgagaaccatcaccacccgaagcaacagcatcaaacaaggcaaggaccagcactttcctgtgttcatgaacgagaaggaggacatcctgtggtgtaccgagatggagagagtgttcgggttcccagtccactacacagatgtcagcaacatgtctagactggccagacagagactgctgggaagaagctggtccgtccctgtgatcagacacctgttcgcccctctgaaggagtacttcgcctgcgtgagcagcggcaacagcaacgccaacagccggggccccagcttctctagcggcctggtgccactgtccctgagagggagccacatgggccccatggagatctacaaaaccgtgagcgcctggaagcggcagcctgtgcgcgtgctgagcctgtttcggaatatcgataaagtcctgaaaagcctgggattcctggagagcggctctggctccggcggtggcaccctgaagtacgtggaggatgtgacaaacgtggtcagacgggatgtggagaagtggggccccttcgatctggtgtacggcagcacccaacccctgggcagctcttgtgaccggtgccctggctggtacatgtttcagttccaccggatcctgcagtacgccctgccgagacaggagtcccagcggccattcttttggattttcatggacaacttgctgctgaccgaggatgaccaggaaactaccactcggttcctgcagaccgaagccgtgaccctgcaggacgtgagaggccgggactaccagaacgccatgcgggtgtggtccaacatccctggactgaaaagcaagcacgcacctctgacccctaaagaagaggagtacctgcaggcccaggtgcggagcagaagcaagctggacgcccctaaggtggatctgctggtgaagaattgcctcctgcccctgagagagtacttcaagtatttcagccagaatagtctgcccctgggaggcagcggcggcggcgccctggtgacatttgaggacgtcgccgtgcggttcacccaggaggaatgggctctgctggatccttctcagaaaatcctgtaccgggacgtgatgagagagacataccggaatctgacctccgtgggcatcaactgggaatgttgggaccttgaagcctgcttcagaagcctgggaagaaacctgagagtgcaggtggtgaagagaaagtgcgagctgaccaacagcggcccctgcgccgagggcggcccaagcagcggcgcccctcctcccagcggcggcagcccagccggctccccaacctctaccgaggagggcacctctgagtccgccacccccgagagcggccctggcacctccaccgagcccagcgagggcagcgcacccggcagccctgccggcagccccacctccacagaggagggaaccagcaccgagcccagcgaaggcagcgccccaggcaccagcaccgagcctagtgagcaggagattaaacggatcaacaagatcagaagaagacttgtgaaagacagcaacaccaagaaggccggcaagacaggccccatgaaaaccctgctggttagagtgatgacacccgatctgagagagcggctggaaaacctgagaaagaagcctgaaaatatcccccagcccatcagcaatacatctagagccaacctgaataagctgctgaccgattacaccgaaatgaagaaggcgatcctgcatgtgtactgggaagagttccagaaggaccctgtgggcctgatgagccgggtggcccagcctgccagcaagaagatcgatcagaacaagctgaaacctgagatggacgagaagggcaacctgaccaccgccggctttgcctgctctcagtgtggccagcccctgttcgtgtacaagctggagcaggtgtctgagaagggcaaggcttacaccaactacttcggacggtgcaatgtggccgagcacgaaaagctgatcctgctggcccagctgaagcccgagaaggatagcgacgaagccgtgacatatagcctgggaaagtttgggcagagggccctggatttctacagcattcatgtgaccaaggagtccacccaccccgtgaagcccctggcccagatcgccggaaacagatacgcctccggacctgtgggaaaggccctgagcgacgcatgtatgggcacaatcgcctccttcctgtctaagtaccaggacatcatcatcgaacaccagaaggtggtgaagggcaaccagaagagactggagagcctgcgggagctggccggcaaggaaaacctggaataccctagcgtgaccctgccacctcagcctcacaccaaggagggcgttgatgcctacaacgaagtgatcgcccgggtgcgaatgtgggtgaacctgaacctgtggcagaagctgaagctaagcagagatgatgccaagcctctgctgagactgaagggattcccttcctttcctctggtcgagagacaggccaacgaagtggactggtgggacatggtgtgtaacgtgaagaagctgatcaacgagaaaaaggaggatggcaaggtgttttggcagaatctggctggctacaagagacaggaagccctgagaccatacctgagcagcgaggaagatcggaagaagggaaagaaattcgctcggtaccagctgggcgacctgctgctgcacctggaaaagaagcacggcgaggactggggaaaggtgtacgacgaggcctgggagcggattgacaagaaagtggaaggcctgagcaagcacatcaagctggaagaggaacggagaagcgaggacgcccagagcaaggccgccctgaccgactggctgcgggctaaggccagcttcgtgatcgagggcctgaaggaggccgacaaggacgagttctgcagatgcgagctgaagctgcagaagtggtacggggacctgcggggaaagcccttcgccatcgaagccgagaacagcatcctggacatcagcggcttcagcaagcagtacaactgtgccttcatctggcagaaggacggcgtgaagaagctgaacctgtacctgatcatcaactacttcaagggcggcaagctgcggttcaagaagatcaaacctgaagccttcgaagccaacagattctacaccgtgatcaacaaaaagagcggcgagatcgtgcccatggaggtgaacttcaacttcgacgaccccaacctgatcatcctgcctctggcctttggcaagagacagggcagagaattcatctggaacgacctgctgtccctggaaaccggcagcctgaagctggccaacggaagagtgatcgagaagacactgtacaacagaagaacccggcaggatgagcctgccctgttcgtggccctgaccttcgagcggcgggaggtcctggactcctccaatatcaaaccaatgaacctgatcggcgtggcaagaggcgaaaacatccccgccgtgatcgccctgaccgaccccgagggctgcccactgagccggtttaaggatagcctgggaaacccaacccacatcctgagaatcggcgagagctataaggagaagcagcggaccatccaggccaagaaggaggtggagcagcggagagccggcggctacagccggaagtacgccagcaaagccaagaatctggcagacgatatggtgagaaacaccgctagagatctgctgtactacgccgtgacccaggatgccatgctgatcttcgccaacctgagccggggcttcggccggcagggcaagcggaccttcatggccgagagacagtacacacggatggaggactggctgaccgccaagctggcctacgagggcctgagcaagacctacctgtccaagacactggcccagtacacctccaagacatgcagcaactgtgggtttaccatcaccagcgccgactacgacagggtgctggagaagctgaagaagacagcaacaggctggatgaccacaattaacggcaaggagctgaaggtggagggccagattacctactacaacagatacaagagacagaacgtagtcaaggacctgtccgtcgagctggatagactgagcgaagaatctgtgaacaacgacatctcctcctggacaaagggcagaagcggagaagctctgagcctcctgaagaaaagattctcccatagacccgtgcaggagaagttcgtgtgcctgaactgcggcttcgagacacacgcagccgagcaagccgccctgaacatcgccagatcctggctgttcctgcggagccaggagtacaagaaataccagacaaacaagacaaccggcaacaccgataagagagccttcgtcgagacctggcagtccttttaccggaagaagcttaaggaggtgtggaaacctgccgtgcggtctggcggatctggcggaggctcccaggacgtggtgacattcaaggacgtcgccatctacttcagccctgaggaatgggtgcggctgagcgccggacagagagaactgtaccaggaggtgatgctggacaactacgagctggtgaccagcctggatagagagagcaaactgctgtataagatggaccccgaggaagaaagctgcgagggcgtgccatacagctctgccgacagcggcgcccctgatagctcctccacctctgcttgtggcggcccaagcagcggcgcccctcctcccagcggcggcagcccagccggctccccaacctctaccgaggagggcacctctgagtccgccacccccgagagcggccctggcacctccaccgagcccagcgagggcagcgcacccggcagccctgccggcagccccacctccacagaggagggaaccagcaccgagcccagcgaaggcagcgccccaggcaccagcaccgagcctagtgagcaggagattaaacggatcaacaagatcagaagaagacttgtgaaagacagcaacaccaagaaggccggcaagacaggccccatgaaaaccctgctggttagagtgatgacacccgatctgagagagcggctggaaaacctgagaaagaagcctgaaaatatcccccagcccatcagcaatacatctagagccaacctgaataagctgctgaccgattacaccgaaatgaagaaggcgatcctgcatgtgtactgggaagagttccagaaggaccctgtgggcctgatgagccgggtggcccagcctgccagcaagaagatcgatcagaacaagctgaaacctgagatggacgagaagggcaacctgaccaccgccggctttgcctgctctcagtgtggccagcccctgttcgtgtacaagctggagcaggtgtctgagaagggcaaggcttacaccaactacttcggacggtgcaatgtggccgagcacgaaaagctgatcctgctggcccagctgaagcccgagaaggatagcgacgaagccgtgacatatagcctgggaaagtttgggcagagggccctggatttctacagcattcatgtgaccaaggagtccacccaccccgtgaagcccctggcccagatcgccggaaacagatacgcctccggacctgtgggaaaggccctgagcgacgcatgtatgggcacaatcgcctccttcctgtctaagtaccaggacatcatcatcgaacaccagaaggtggtgaagggcaaccagaagagactggagagcctgcgggagctggccggcaaggaaaacctggaataccctagcgtgaccctgccacctcagcctcacaccaaggagggcgttgatgcctacaacgaagtgatcgcccgggtgcgaatgtgggtgaacctgaacctgtggcagaagctgaagctaagcagagatgatgccaagcctctgctgagactgaagggattcccttcctttcctctggtcgagagacaggccaacgaagtggactggtgggacatggtgtgtaacgtgaagaagctgatcaacgagaaaaaggaggatggcaaggtgttttggcagaatctggctggctacaagagacaggaagccctgagaccatacctgagcagcgaggaagatcggaagaagggaaagaaattcgctcggtaccagctgggcgacctgctgctgcacctggaaaagaagcacggcgaggactggggaaaggtgtacgacgaggcctgggagcggattgacaagaaagtggaaggcctgagcaagcacatcaagctggaagaggaacggagaagcgaggacgcccagagcaaggccgccctgaccgactggctgcgggctaaggccagcttcgtgatcgagggcctgaaggaggccgacaaggacgagttctgcagatgcgagctgaagctgcagaagtggtacggggacctgcggggaaagcccttcgccatcgaagccgagaacagcatcctggacatcagcggcttcagcaagcagtacaactgtgccttcatctggcagaaggacggcgtgaagaagctgaacctgtacctgatcatcaactacttcaagggcggcaagctgcggttcaagaagatcaaacctgaagccttcgaagccaacagattctacaccgtgatcaacaaaaagagcggcgagatcgtgcccatggaggtgaacttcaacttcgacgaccccaacctgatcatcctgcctctggcctttggcaagagacagggcagagaattcatctggaacgacctgctgtccctggaaaccggcagcctgaagctggccaacggaagagtgatcgagaagacactgtacaacagaagaacccggcaggatgagcctgccctgttcgtggccctgaccttcgagcggcgggaggtcctggactcctccaatatcaaaccaatgaacctgatcggcgtggcaagaggcgaaaacatccccgccgtgatcgccctgaccgaccccgagggctgcccactgagccggtttaaggatagcctgggaaacccaacccacatcctgagaatcggcgagagctataaggagaagcagcggaccatccaggccaagaaggaggtggagcagcggagagccggcggctacagccggaagtacgccagcaaagccaagaatctggcagacgatatggtgagaaacaccgctagagatctgctgtactacgccgtgacccaggatgccatgctgatcttcgccaacctgagccggggcttcggccggcagggcaagcggaccttcatggccgagagacagtacacacggatggaggactggctgaccgccaagctggcctacgagggcctgagcaagacctacctgtccaagacactggcccagtacacctccaagacatgcagcaactgtgggtttaccatcaccagcgccgactacgacagggtgctggagaagctgaagaagacagcaacaggctggatgaccacaattaacggcaaggagctgaaggtggagggccagattacctactacaacagatacaagagacagaacgtagtcaaggacctgtccgtcgagctggatagactgagcgaagaatctgtgaacaacgacatctcctcctggacaaagggcagaagcggagaagctctgagcctcctgaagaaaagattctcccatagacccgtgcaggagaagttcgtgtgcctgaactgcggcttcgagacacacgcagccgagcaagccgccctgaacatcgccagatcctggctgttcctgcggagccaggagtacaagaaataccagacaaacaagacaaccggcaacaccgataagagagccttcgtcgagacctggcagtccttttaccggaagaagcttaaggaggtgtggaaacctgccgtgcggtctggcggatctggcggaggctccttctacacctgtgaccttcgaggatgtggtggtctacttcaccgccgctgagtgggtgcacctgacaaactggcaaagagatttttatcaggccgtgatgatggaaacctacgagctggtggccagcgtggctggcgacggcgttccaatggccgaggacgaggaaggcggagtggaaagacccgtgtggcagtacatccccagaggcaagcggcggagaaagacccctcagcctcgcgccgacggatctggctccggcagcggccccaagaaaaagagaaaagtctaagctgccttctgcggggcttgccttctggccatgcccttcttctctcccttgcacctgtacctcttggtctttgaataaagcctgagtaggaaggctagcaaaaaaaaaaaaaaaaaaaaaaaaaaaaaaaaaaaaaaaaaaaaaaaaaaaaaaaaaaaaaaaaaaaaaaaaaaaaaaaa

SEQ ID NO: 18509 - RNA, 9512 nt, synthetic construct
  source 1..9512: mol_type = other RNA
aggaaataagagagaaaagaagagtaagaagaaatataagagccaccatggcccctaagaagaagcgtaaagtgagccggatggaacgcctcgtctacgaggtgcggcagaagtgcagaaacatcgaggacatctgcatctcctgcggatctctgaacgtgaccctggagcacccactgttcatcggcggcatgtgccagaactgtaaaaactgttttctggagtgtgcctatcaatacgacgatgacggctaccagagctactgcaccatctgttgcggcggaagagaggtgctgatgtgtggaaataacaactgctgccggtgcttctgcgtggaatgcgtggacctgctggtgggccccggcgccgcccaggccgctattaaggaagatccttggaactgctacatgtgcggccacaagggcacatacggcctgctgagacggagagaggactggcctagcagactgcagatgttcttcgccaataaccacgaccaggagttcgacccccctaaggtgtaccctcccgtccccgccgagaagagaaagcccatccgggtcctgagcctgttcgatggcatcgccaccggtctgctggtgctgaaggacctgggcatccaggtggataggtacattgcctccgaggtgtgcgaggactccatcaccgtgggaatggtgcgtcatcagggcaagatcatgtacgtgggcgacgtgcggagcgtgacacagaagcatatccaggagtggggccctttcgacctggtgatcggcggcagcccttgcaatgacctgagcatcgtgaacccagcccggaagggcctgtacgagggaaccggcagactgttcttcgagttttacagactgctgcacgacgcccggcctaaggaaggcgacgaccggcccttcttttggctgttcgagaatgtggtggccatgggagtcagcgacaagcgggatattagccggttcctggagagcaaccccgtgatgatcgatgccaaggaagtgagcgccgcccaccgggccagatacttctggggcaatctgcctggcatgaacagacccctggccagcaccgtgaacgacaagctggagctgcaggagtgcctggagcacggccggatcgccaagttcagcaaggtgagaaccatcaccacccgaagcaacagcatcaaacaaggcaaggaccagcactttcctgtgttcatgaacgagaaggaggacatcctgtggtgtaccgagatggagagagtgttcgggttcccagtccactacacagatgtcagcaacatgtctagactggccagacagagactgctgggaagaagctggtccgtccctgtgatcagacacctgttcgcccctctgaaggagtacttcgcctgcgtgagcagcggcaacagcaacgccaacagccggggccccagcttctctagcggcctggtgccactgtccctgagagggagccacatgggccccatggagatctacaaaaccgtgagcgcctggaagcggcagcctgtgcgcgtgctgagcctgtttcggaatatcgataaagtcctgaaaagcctgggattcctggagagcggctctggctccggcggtggcaccctgaagtacgtggaggatgtgacaaacgtggtcagacgggatgtggagaagtggggccccttcgatctggtgtacggcagcacccaacccctgggcagctcttgtgaccggtgccctggctggtacatgtttcagttccaccggatcctgcagtacgccctgccgagacaggagtcccagcggccattcttttggattttcatggacaacttgctgctgaccgaggatgaccaggaaactaccactcggttcctgcagaccgaagccgtgaccctgcaggacgtgagaggccgggactaccagaacgccatgcgggtgtggtccaacatccctggactgaaaagcaagcacgcacctctgacccctaaagaagaggagtacctgcaggcccaggtgcggagcagaagcaagctggacgcccctaaggtggatctgctggtgaagaattgcctcctgcccctgagagagtacttcaagtatttcagccagaatagtctgcccctgggaggcagcggcggcggcgccctggtgacatttgaggacgtcgccgtgcggttcacccaggaggaatgggctctgctggatccttctcagaaaatcctgtaccgggacgtgatgagagagacataccggaatctgacctccgtgggcatcaactgggaatgttgggaccttgaagcctgcttcagaagcctgggaagaaacctgagagtgcaggtggtgaagagaaagtgcgagctgaccaacagcggcccctgcgccgagggcggcccaagcagcggcgcccctcctcccagcggcggcagcccagccggctccccaacctctaccgaggagggcacctctgagtccgccacccccgagagcggccctggcacctccaccgagcccagcgagggcagcgcacccggcagccctgccggcagccccacctccacagaggagggaaccagcaccgagcccagcgaaggcagcgccccaggcaccagcaccgagcctagtgagcaggagattaaacggatcaacaagatcagaagaagacttgtgaaagacagcaacaccaagaaggccggcaagacaggccccatgaaaaccctgctggttagagtgatgacacccgatctgagagagcggctggaaaacctgagaaagaagcctgaaaatatcccccagcccatcagcaatacatctagagccaacctgaataagctgctgaccgattacaccgaaatgaagaaggcgatcctgcatgtgtactgggaagagttccagaaggaccctgtgggcctgatgagccgggtggcccagcctgccagcaagaagatcgatcagaacaagctgaaacctgagatggacgagaagggcaacctgaccaccgccggctttgcctgctctcagtgtggccagcccctgttcgtgtacaagctggagcaggtgtctgagaagggcaaggcttacaccaactacttcggacggtgcaatgtggccgagcacgaaaagctgatcctgctggcccagctgaagcccgagaaggatagcgacgaagccgtgacatatagcctgggaaagtttgggcagagggccctggatttctacagcattcatgtgaccaaggagtccacccaccccgtgaagcccctggcccagatcgccggaaacagatacgcctccggacctgtgggaaaggccctgagcgacgcatgtatgggcacaatcgcctccttcctgtctaagtaccaggacatcatcatcgaacaccagaaggtggtgaagggcaaccagaagagactggagagcctgcgggagctggccggcaaggaaaacctggaataccctagcgtgaccctgccacctcagcctcacaccaaggagggcgttgatgcctacaacgaagtgatcgcccgggtgcgaatgtgggtgaacctgaacctgtggcagaagctgaagctaagcagagatgatgccaagcctctgctgagactgaagggattcccttcctttcctctggtcgagagacaggccaacgaagtggactggtgggacatggtgtgtaacgtgaagaagctgatcaacgagaaaaaggaggatggcaaggtgttttggcagaatctggctggctacaagagacaggaagccctgagaccatacctgagcagcgaggaagatcggaagaagggaaagaaattcgctcggtaccagctgggcgacctgctgctgcacctggaaaagaagcacggcgaggactggggaaaggtgtacgacgaggcctgggagcggattgacaagaaagtggaaggcctgagcaagcacatcaagctggaagaggaacggagaagcgaggacgcccagagcaaggccgccctgaccgactggctgcgggctaaggccagcttcgtgatcgagggcctgaaggaggccgacaaggacgagttctgcagatgcgagctgaagctgcagaagtggtacggggacctgcggggaaagcccttcgccatcgaagccgagaacagcatcctggacatcagcggcttcagcaagcagtacaactgtgccttcatctggcagaaggacggcgtgaagaagctgaacctgtacctgatcatcaactacttcaagggcggcaagctgcggttcaagaagatcaaacctgaagccttcgaagccaacagattctacaccgtgatcaacaaaaagagcggcgagatcgtgcccatggaggtgaacttcaacttcgacgaccccaacctgatcatcctgcctctggcctttggcaagagacagggcagagaattcatctggaacgacctgctgtccctggaaaccggcagcctgaagctggccaacggaagagtgatcgagaagacactgtacaacagaagaacccggcaggatgagcctgccctgttcgtggccctgaccttcgagcggcgggaggtcctggactcctccaatatcaaaccaatgaacctgatcggcgtggcaagaggcgaaaacatccccgccgtgatcgccctgaccgaccccgagggctgcccactgagccggtttaaggatagcctgggaaacccaacccacatcctgagaatcggcgagagctataaggagaagcagcggaccatccaggccaagaaggaggtggagcagcggagagccggcggctacagccggaagtacgccagcaaagccaagaatctggcagacgatatggtgagaaacaccgctagagatctgctgtactacgccgtgacccaggatgccatgctgatcttcgccaacctgagccggggcttcggccggcagggcaagcggaccttcatggccgagagacagtacacacggatggaggactggctgaccgccaagctggcctacgagggcctgagcaagacctacctgtccaagacactggcccagtacacctccaagacatgcagcaactgtgggtttaccatcaccagcgccgactacgacagggtgctggagaagctgaagaagacagcaacaggctggatgaccacaattaacggcaaggagctgaaggtggagggccagattacctactacaacagatacaagagacagaacgtagtcaaggacctgtccgtcgagctggatagactgagcgaagaatctgtgaacaacgacatctcctcctggacaaagggcagaagcggagaagctctgagcctcctgaagaaaagattctcccatagacccgtgcaggagaagttcgtgtgcctgaactgcggcttcgagacacacgcagccgagcaagccgccctgaacatcgccagatcctggctgttcctgcggagccaggagtacaagaaataccagacaaacaagacaaccggcaacaccgataagagagccttcgtcgagacctggcagtccttttaccggaagaagcttaaggaggtgtggaaacctgccgtgcggtctggcggatctggcggaggctcccaggacgtggtgacattcaaggacgtcgccatctacttcagccctgaggaatgggtgcggctgagcgccggacagagagaactgtaccaggaggtgatgctggacaactacgagctggtgaccagcctggatagagagagcaaactgctgtataagatggaccccgaggaagaaagctgcgagggcgtgccatacagctctgccgacagcggcgcccctgatagctcctccacctctgcttgtggcggcccaagcagcggcgcccctcctcccagcggcggcagcccagccggctccccaacctctaccgaggagggcacctctgagtccgccacccccgagagcggccctggcacctccaccgagcccagcgagggcagcgcacccggcagccctgccggcagccccacctccacagaggagggaaccagcaccgagcccagcgaaggcagcgccccaggcaccagcaccgagcctagtgagcaggagattaaacggatcaacaagatcagaagaagacttgtgaaagacagcaacaccaagaaggccggcaagacaggccccatgaaaaccctgctggttagagtgatgacacccgatctgagagagcggctggaaaacctgagaaagaagcctgaaaatatcccccagcccatcagcaatacatctagagccaacctgaataagctgctgaccgattacaccgaaatgaagaaggcgatcctgcatgtgtactgggaagagttccagaaggaccctgtgggcctgatgagccgggtggcccagcctgccagcaagaagatcgatcagaacaagctgaaacctgagatggacgagaagggcaacctgaccaccgccggctttgcctgctctcagtgtggccagcccctgttcgtgtacaagctggagcaggtgtctgagaagggcaaggcttacaccaactacttcggacggtgcaatgtggccgagcacgaaaagctgatcctgctggcccagctgaagcccgagaaggatagcgacgaagccgtgacatatagcctgggaaagtttgggcagagggccctggatttctacagcattcatgtgaccaaggagtccacccaccccgtgaagcccctggcccagatcgccggaaacagatacgcctccggacctgtgggaaaggccctgagcgacgcatgtatgggcacaatcgcctccttcctgtctaagtaccaggacatcatcatcgaacaccagaaggtggtgaagggcaaccagaagagactggagagcctgcgggagctggccggcaaggaaaacctggaataccctagcgtgaccctgccacctcagcctcacaccaaggagggcgttgatgcctacaacgaagtgatcgcccgggtgcgaatgtgggtgaacctgaacctgtggcagaagctgaagctaagcagagatgatgccaagcctctgctgagactgaagggattcccttcctttcctctggtcgagagacaggccaacgaagtggactggtgggacatggtgtgtaacgtgaagaagctgatcaacgagaaaaaggaggatggcaaggtgttttggcagaatctggctggctacaagagacaggaagccctgagaccatacctgagcagcgaggaagatcggaagaagggaaagaaattcgctcggtaccagctgggcgacctgctgctgcacctggaaaagaagcacggcgaggactggggaaaggtgtacgacgaggcctgggagcggattgacaagaaagtggaaggcctgagcaagcacatcaagctggaagaggaacggagaagcgaggacgcccagagcaaggccgccctgaccgactggctgcgggctaaggccagcttcgtgatcgagggcctgaaggaggccgacaaggacgagttctgcagatgcgagctgaagctgcagaagtggtacggggacctgcggggaaagcccttcgccatcgaagccgagaacagcatcctggacatcagcggcttcagcaagcagtacaactgtgccttcatctggcagaaggacggcgtgaagaagctgaacctgtacctgatcatcaactacttcaagggcggcaagctgcggttcaagaagatcaaacctgaagccttcgaagccaacagattctacaccgtgatcaacaaaaagagcggcgagatcgtgcccatggaggtgaacttcaacttcgacgaccccaacctgatcatcctgcctctggcctttggcaagagacagggcagagaattcatctggaacgacctgctgtccctggaaaccggcagcctgaagctggccaacggaagagtgatcgagaagacactgtacaacagaagaacccggcaggatgagcctgccctgttcgtggccctgaccttcgagcggcgggaggtcctggactcctccaatatcaaaccaatgaacctgatcggcgtggcaagaggcgaaaacatccccgccgtgatcgccctgaccgaccccgagggctgcccactgagccggtttaaggatagcctgggaaacccaacccacatcctgagaatcggcgagagctataaggagaagcagcggaccatccaggccaagaaggaggtggagcagcggagagccggcggctacagccggaagtacgccagcaaagccaagaatctggcagacgatatggtgagaaacaccgctagagatctgctgtactacgccgtgacccaggatgccatgctgatcttcgccaacctgagccggggcttcggccggcagggcaagcggaccttcatggccgagagacagtacacacggatggaggactggctgaccgccaagctggcctacgagggcctgagcaagacctacctgtccaagacactggcccagtacacctccaagacatgcagcaactgtgggtttaccatcaccagcgccgactacgacagggtgctggagaagctgaagaagacagcaacaggctggatgaccacaattaacggcaaggagctgaaggtggagggccagattacctactacaacagatacaagagacagaacgtagtcaaggacctgtccgtcgagctggatagactgagcgaagaatctgtgaacaacgacatctcctcctggacaaagggcagaagcggagaagctctgagcctcctgaagaaaagattctcccatagacccgtgcaggagaagttcgtgtgcctgaactgcggcttcgagacacacgcagccgagcaagccgccctgaacatcgccagatcctggctgttcctgcggagccaggagtacaagaaataccagacaaacaagacaaccggcaacaccgataagagagccttcgtcgagacctggcagtccttttaccggaagaagcttaaggaggtgtggaaacctgccgtgcggtctggcggatctggcggaggctcctgtcgccttccgggacgtgatcgtggacttcacccaggaggaatggcagcagctgaagcctgctcaaaaggacctgtacagagatgtgatgatggaaatctactggaatctggtgtctctggacctggaaaccgagggagatatgaacgagcctgaccccgagaaagacagctgggaggatagaacaagcatcgtggttgtggaaggcctgatgcggaacggcgcccagggctacgcctgcgagaaggccggcatccagggctgtagagtgggatctggctccggcagcggccccaagaaaaagagaaaagtctaagctgccttctgcggggcttgccttctggccatgcccttcttctctcccttgcacctgtacctcttggtctttgaataaagcctgagtaggaaggctagcaaaaaaaaaaaaaaaaaaaaaaaaaaaaaaaaaaaaaaaaaaaaaaaaaaaaaaaaaaaaaaaaaaaaaaaaaaaaaaaa

SEQ ID NO: 18510 - RNA, 9494 nt, synthetic construct
  source 1..9494: mol_type = other RNA
aggaaataagagagaaaagaagagtaagaagaaatataagagccaccatggcccctaagaagaagcgtaaagtgagccggatggaacgcctcgtctacgaggtgcggcagaagtgcagaaacatcgaggacatctgcatctcctgcggatctctgaacgtgaccctggagcacccactgttcatcggcggcatgtgccagaactgtaaaaactgttttctggagtgtgcctatcaatacgacgatgacggctaccagagctactgcaccatctgttgcggcggaagagaggtgctgatgtgtggaaataacaactgctgccggtgcttctgcgtggaatgcgtggacctgctggtgggccccggcgccgcccaggccgctattaaggaagatccttggaactgctacatgtgcggccacaagggcacatacggcctgctgagacggagagaggactggcctagcagactgcagatgttcttcgccaataaccacgaccaggagttcgacccccctaaggtgtaccctcccgtccccgccgagaagagaaagcccatccgggtcctgagcctgttcgatggcatcgccaccggtctgctggtgctgaaggacctgggcatccaggtggataggtacattgcctccgaggtgtgcgaggactccatcaccgtgggaatggtgcgtcatcagggcaagatcatgtacgtgggcgacgtgcggagcgtgacacagaagcatatccaggagtggggccctttcgacctggtgatcggcggcagcccttgcaatgacctgagcatcgtgaacccagcccggaagggcctgtacgagggaaccggcagactgttcttcgagttttacagactgctgcacgacgcccggcctaaggaaggcgacgaccggcccttcttttggctgttcgagaatgtggtggccatgggagtcagcgacaagcgggatattagccggttcctggagagcaaccccgtgatgatcgatgccaaggaagtgagcgccgcccaccgggccagatacttctggggcaatctgcctggcatgaacagacccctggccagcaccgtgaacgacaagctggagctgcaggagtgcctggagcacggccggatcgccaagttcagcaaggtgagaaccatcaccacccgaagcaacagcatcaaacaaggcaaggaccagcactttcctgtgttcatgaacgagaaggaggacatcctgtggtgtaccgagatggagagagtgttcgggttcccagtccactacacagatgtcagcaacatgtctagactggccagacagagactgctgggaagaagctggtccgtccctgtgatcagacacctgttcgcccctctgaaggagtacttcgcctgcgtgagcagcggcaacagcaacgccaacagccggggccccagcttctctagcggcctggtgccactgtccctgagagggagccacatgggccccatggagatctacaaaaccgtgagcgcctggaagcggcagcctgtgcgcgtgctgagcctgtttcggaatatcgataaagtcctgaaaagcctgggattcctggagagcggctctggctccggcggtggcaccctgaagtacgtggaggatgtgacaaacgtggtcagacgggatgtggagaagtggggccccttcgatctggtgtacggcagcacccaacccctgggcagctcttgtgaccggtgccctggctggtacatgtttcagttccaccggatcctgcagtacgccctgccgagacaggagtcccagcggccattcttttggattttcatggacaacttgctgctgaccgaggatgaccaggaaactaccactcggttcctgcagaccgaagccgtgaccctgcaggacgtgagaggccgggactaccagaacgccatgcgggtgtggtccaacatccctggactgaaaagcaagcacgcacctctgacccctaaagaagaggagtacctgcaggcccaggtgcggagcagaagcaagctggacgcccctaaggtggatctgctggtgaagaattgcctcctgcccctgagagagtacttcaagtatttcagccagaatagtctgcccctgggaggcagcggcggcggcgccctggtgacatttgaggacgtcgccgtgcggttcacccaggaggaatgggctctgctggatccttctcagaaaatcctgtaccgggacgtgatgagagagacataccggaatctgacctccgtgggcatcaactgggaatgttgggaccttgaagcctgcttcagaagcctgggaagaaacctgagagtgcaggtggtgaagagaaagtgcgagctgaccaacagcggcccctgcgccgagggcggcccaagcagcggcgcccctcctcccagcggcggcagcccagccggctccccaacctctaccgaggagggcacctctgagtccgccacccccgagagcggccctggcacctccaccgagcccagcgagggcagcgcacccggcagccctgccggcagccccacctccacagaggagggaaccagcaccgagcccagcgaaggcagcgccccaggcaccagcaccgagcctagtgagcaggagattaaacggatcaacaagatcagaagaagacttgtgaaagacagcaacaccaagaaggccggcaagacaggccccatgaaaaccctgctggttagagtgatgacacccgatctgagagagcggctggaaaacctgagaaagaagcctgaaaatatcccccagcccatcagcaatacatctagagccaacctgaataagctgctgaccgattacaccgaaatgaagaaggcgatcctgcatgtgtactgggaagagttccagaaggaccctgtgggcctgatgagccgggtggcccagcctgccagcaagaagatcgatcagaacaagctgaaacctgagatggacgagaagggcaacctgaccaccgccggctttgcctgctctcagtgtggccagcccctgttcgtgtacaagctggagcaggtgtctgagaagggcaaggcttacaccaactacttcggacggtgcaatgtggccgagcacgaaaagctgatcctgctggcccagctgaagcccgagaaggatagcgacgaagccgtgacatatagcctgggaaagtttgggcagagggccctggatttctacagcattcatgtgaccaaggagtccacccaccccgtgaagcccctggcccagatcgccggaaacagatacgcctccggacctgtgggaaaggccctgagcgacgcatgtatgggcacaatcgcctccttcctgtctaagtaccaggacatcatcatcgaacaccagaaggtggtgaagggcaaccagaagagactggagagcctgcgggagctggccggcaaggaaaacctggaataccctagcgtgaccctgccacctcagcctcacaccaaggagggcgttgatgcctacaacgaagtgatcgcccgggtgcgaatgtgggtgaacctgaacctgtggcagaagctgaagctaagcagagatgatgccaagcctctgctgagactgaagggattcccttcctttcctctggtcgagagacaggccaacgaagtggactggtgggacatggtgtgtaacgtgaagaagctgatcaacgagaaaaaggaggatggcaaggtgttttggcagaatctggctggctacaagagacaggaagccctgagaccatacctgagcagcgaggaagatcggaagaagggaaagaaattcgctcggtaccagctgggcgacctgctgctgcacctggaaaagaagcacggcgaggactggggaaaggtgtacgacgaggcctgggagcggattgacaagaaagtggaaggcctgagcaagcacatcaagctggaagaggaacggagaagcgaggacgcccagagcaaggccgccctgaccgactggctgcgggctaaggccagcttcgtgatcgagggcctgaaggaggccgacaaggacgagttctgcagatgcgagctgaagctgcagaagtggtacggggacctgcggggaaagcccttcgccatcgaagccgagaacagcatcctggacatcagcggcttcagcaagcagtacaactgtgccttcatctggcagaaggacggcgtgaagaagctgaacctgtacctgatcatcaactacttcaagggcggcaagctgcggttcaagaagatcaaacctgaagccttcgaagccaacagattctacaccgtgatcaacaaaaagagcggcgagatcgtgcccatggaggtgaacttcaacttcgacgaccccaacctgatcatcctgcctctggcctttggcaagagacagggcagagaattcatctggaacgacctgctgtccctggaaaccggcagcctgaagctggccaacggaagagtgatcgagaagacactgtacaacagaagaacccggcaggatgagcctgccctgttcgtggccctgaccttcgagcggcgggaggtcctggactcctccaatatcaaaccaatgaacctgatcggcgtggcaagaggcgaaaacatccccgccgtgatcgccctgaccgaccccgagggctgcccactgagccggtttaaggatagcctgggaaacccaacccacatcctgagaatcggcgagagctataaggagaagcagcggaccatccaggccaagaaggaggtggagcagcggagagccggcggctacagccggaagtacgccagcaaagccaagaatctggcagacgatatggtgagaaacaccgctagagatctgctgtactacgccgtgacccaggatgccatgctgatcttcgccaacctgagccggggcttcggccggcagggcaagcggaccttcatggccgagagacagtacacacggatggaggactggctgaccgccaagctggcctacgagggcctgagcaagacctacctgtccaagacactggcccagtacacctccaagacatgcagcaactgtgggtttaccatcaccagcgccgactacgacagggtgctggagaagctgaagaagacagcaacaggctggatgaccacaattaacggcaaggagctgaaggtggagggccagattacctactacaacagatacaagagacagaacgtagtcaaggacctgtccgtcgagctggatagactgagcgaagaatctgtgaacaacgacatctcctcctggacaaagggcagaagcggagaagctctgagcctcctgaagaaaagattctcccatagacccgtgcaggagaagttcgtgtgcctgaactgcggcttcgagacacacgcagccgagcaagccgccctgaacatcgccagatcctggctgttcctgcggagccaggagtacaagaaataccagacaaacaagacaaccggcaacaccgataagagagccttcgtcgagacctggcagtccttttaccggaagaagcttaaggaggtgtggaaacctgccgtgcggtctggcggatctggcggaggctcccaggacgtggtgacattcaaggacgtcgccatctacttcagccctgaggaatgggtgcggctgagcgccggacagagagaactgtaccaggaggtgatgctggacaactacgagctggtgaccagcctggatagagagagcaaactgctgtataagatggaccccgaggaagaaagctgcgagggcgtgccatacagctctgccgacagcggcgcccctgatagctcctccacctctgcttgtggcggcccaagcagcggcgcccctcctcccagcggcggcagcccagccggctccccaacctctaccgaggagggcacctctgagtccgccacccccgagagcggccctggcacctccaccgagcccagcgagggcagcgcacccggcagccctgccggcagccccacctccacagaggagggaaccagcaccgagcccagcgaaggcagcgccccaggcaccagcaccgagcctagtgagcaggagattaaacggatcaacaagatcagaagaagacttgtgaaagacagcaacaccaagaaggccggcaagacaggccccatgaaaaccctgctggttagagtgatgacacccgatctgagagagcggctggaaaacctgagaaagaagcctgaaaatatcccccagcccatcagcaatacatctagagccaacctgaataagctgctgaccgattacaccgaaatgaagaaggcgatcctgcatgtgtactgggaagagttccagaaggaccctgtgggcctgatgagccgggtggcccagcctgccagcaagaagatcgatcagaacaagctgaaacctgagatggacgagaagggcaacctgaccaccgccggctttgcctgctctcagtgtggccagcccctgttcgtgtacaagctggagcaggtgtctgagaagggcaaggcttacaccaactacttcggacggtgcaatgtggccgagcacgaaaagctgatcctgctggcccagctgaagcccgagaaggatagcgacgaagccgtgacatatagcctgggaaagtttgggcagagggccctggatttctacagcattcatgtgaccaaggagtccacccaccccgtgaagcccctggcccagatcgccggaaacagatacgcctccggacctgtgggaaaggccctgagcgacgcatgtatgggcacaatcgcctccttcctgtctaagtaccaggacatcatcatcgaacaccagaaggtggtgaagggcaaccagaagagactggagagcctgcgggagctggccggcaaggaaaacctggaataccctagcgtgaccctgccacctcagcctcacaccaaggagggcgttgatgcctacaacgaagtgatcgcccgggtgcgaatgtgggtgaacctgaacctgtggcagaagctgaagctaagcagagatgatgccaagcctctgctgagactgaagggattcccttcctttcctctggtcgagagacaggccaacgaagtggactggtgggacatggtgtgtaacgtgaagaagctgatcaacgagaaaaaggaggatggcaaggtgttttggcagaatctggctggctacaagagacaggaagccctgagaccatacctgagcagcgaggaagatcggaagaagggaaagaaattcgctcggtaccagctgggcgacctgctgctgcacctggaaaagaagcacggcgaggactggggaaaggtgtacgacgaggcctgggagcggattgacaagaaagtggaaggcctgagcaagcacatcaagctggaagaggaacggagaagcgaggacgcccagagcaaggccgccctgaccgactggctgcgggctaaggccagcttcgtgatcgagggcctgaaggaggccgacaaggacgagttctgcagatgcgagctgaagctgcagaagtggtacggggacctgcggggaaagcccttcgccatcgaagccgagaacagcatcctggacatcagcggcttcagcaagcagtacaactgtgccttcatctggcagaaggacggcgtgaagaagctgaacctgtacctgatcatcaactacttcaagggcggcaagctgcggttcaagaagatcaaacctgaagccttcgaagccaacagattctacaccgtgatcaacaaaaagagcggcgagatcgtgcccatggaggtgaacttcaacttcgacgaccccaacctgatcatcctgcctctggcctttggcaagagacagggcagagaattcatctggaacgacctgctgtccctggaaaccggcagcctgaagctggccaacggaagagtgatcgagaagacactgtacaacagaagaacccggcaggatgagcctgccctgttcgtggccctgaccttcgagcggcgggaggtcctggactcctccaatatcaaaccaatgaacctgatcggcgtggcaagaggcgaaaacatccccgccgtgatcgccctgaccgaccccgagggctgcccactgagccggtttaaggatagcctgggaaacccaacccacatcctgagaatcggcgagagctataaggagaagcagcggaccatccaggccaagaaggaggtggagcagcggagagccggcggctacagccggaagtacgccagcaaagccaagaatctggcagacgatatggtgagaaacaccgctagagatctgctgtactacgccgtgacccaggatgccatgctgatcttcgccaacctgagccggggcttcggccggcagggcaagcggaccttcatggccgagagacagtacacacggatggaggactggctgaccgccaagctggcctacgagggcctgagcaagacctacctgtccaagacactggcccagtacacctccaagacatgcagcaactgtgggtttaccatcaccagcgccgactacgacagggtgctggagaagctgaagaagacagcaacaggctggatgaccacaattaacggcaaggagctgaaggtggagggccagattacctactacaacagatacaagagacagaacgtagtcaaggacctgtccgtcgagctggatagactgagcgaagaatctgtgaacaacgacatctcctcctggacaaagggcagaagcggagaagctctgagcctcctgaagaaaagattctcccatagacccgtgcaggagaagttcgtgtgcctgaactgcggcttcgagacacacgcagccgagcaagccgccctgaacatcgccagatcctggctgttcctgcggagccaggagtacaagaaataccagacaaacaagacaaccggcaacaccgataagagagccttcgtcgagacctggcagtccttttaccggaagaagcttaaggaggtgtggaaacctgccgtgcggtctggcggatctggcggaggctcctgtgacctacaacgacgtgcacgtggacatcacccaggaggaatgggctctgatggaccccagccagcggaacctgtacaaggatgtgatggtcgagacatacatgaacctgaccgccatcggatataattgggagaacctggaagtggaagaaccatgtcagaaccccctgaagcacggcagacacgagagacctcatacaggcgagaaaccttacgagtacaatcagtgcggcaaggccttcgcccaacctggatctggctccggcagcggccccaagaaaaagagaaaagtctaagctgccttctgcggggcttgccttctggccatgcccttcttctctcccttgcacctgtacctcttggtctttgaataaagcctgagtaggaaggctagcaaaaaaaaaaaaaaaaaaaaaaaaaaaaaaaaaaaaaaaaaaaaaaaaaaaaaaaaaaaaaaaaaaaaaaaaaaaaaaaa

SEQ ID NO: 18511 - RNA, 9485 nt, synthetic construct
  source 1..9485: mol_type = other RNA
aggaaataagagagaaaagaagagtaagaagaaatataagagccaccatggcccctaagaagaagcgtaaagtgagccggatggaacgcctcgtctacgaggtgcggcagaagtgcagaaacatcgaggacatctgcatctcctgcggatctctgaacgtgaccctggagcacccactgttcatcggcggcatgtgccagaactgtaaaaactgttttctggagtgtgcctatcaatacgacgatgacggctaccagagctactgcaccatctgttgcggcggaagagaggtgctgatgtgtggaaataacaactgctgccggtgcttctgcgtggaatgcgtggacctgctggtgggccccggcgccgcccaggccgctattaaggaagatccttggaactgctacatgtgcggccacaagggcacatacggcctgctgagacggagagaggactggcctagcagactgcagatgttcttcgccaataaccacgaccaggagttcgacccccctaaggtgtaccctcccgtccccgccgagaagagaaagcccatccgggtcctgagcctgttcgatggcatcgccaccggtctgctggtgctgaaggacctgggcatccaggtggataggtacattgcctccgaggtgtgcgaggactccatcaccgtgggaatggtgcgtcatcagggcaagatcatgtacgtgggcgacgtgcggagcgtgacacagaagcatatccaggagtggggccctttcgacctggtgatcggcggcagcccttgcaatgacctgagcatcgtgaacccagcccggaagggcctgtacgagggaaccggcagactgttcttcgagttttacagactgctgcacgacgcccggcctaaggaaggcgacgaccggcccttcttttggctgttcgagaatgtggtggccatgggagtcagcgacaagcgggatattagccggttcctggagagcaaccccgtgatgatcgatgccaaggaagtgagcgccgcccaccgggccagatacttctggggcaatctgcctggcatgaacagacccctggccagcaccgtgaacgacaagctggagctgcaggagtgcctggagcacggccggatcgccaagttcagcaaggtgagaaccatcaccacccgaagcaacagcatcaaacaaggcaaggaccagcactttcctgtgttcatgaacgagaaggaggacatcctgtggtgtaccgagatggagagagtgttcgggttcccagtccactacacagatgtcagcaacatgtctagactggccagacagagactgctgggaagaagctggtccgtccctgtgatcagacacctgttcgcccctctgaaggagtacttcgcctgcgtgagcagcggcaacagcaacgccaacagccggggccccagcttctctagcggcctggtgccactgtccctgagagggagccacatgggccccatggagatctacaaaaccgtgagcgcctggaagcggcagcctgtgcgcgtgctgagcctgtttcggaatatcgataaagtcctgaaaagcctgggattcctggagagcggctctggctccggcggtggcaccctgaagtacgtggaggatgtgacaaacgtggtcagacgggatgtggagaagtggggccccttcgatctggtgtacggcagcacccaacccctgggcagctcttgtgaccggtgccctggctggtacatgtttcagttccaccggatcctgcagtacgccctgccgagacaggagtcccagcggccattcttttggattttcatggacaacttgctgctgaccgaggatgaccaggaaactaccactcggttcctgcagaccgaagccgtgaccctgcaggacgtgagaggccgggactaccagaacgccatgcgggtgtggtccaacatccctggactgaaaagcaagcacgcacctctgacccctaaagaagaggagtacctgcaggcccaggtgcggagcagaagcaagctggacgcccctaaggtggatctgctggtgaagaattgcctcctgcccctgagagagtacttcaagtatttcagccagaatagtctgcccctgggaggcagcggcggcggcgccctggtgacatttgaggacgtcgccgtgcggttcacccaggaggaatgggctctgctggatccttctcagaaaatcctgtaccgggacgtgatgagagagacataccggaatctgacctccgtgggcatcaactgggaatgttgggaccttgaagcctgcttcagaagcctgggaagaaacctgagagtgcaggtggtgaagagaaagtgcgagctgaccaacagcggcccctgcgccgagggcggcccaagcagcggcgcccctcctcccagcggcggcagcccagccggctccccaacctctaccgaggagggcacctctgagtccgccacccccgagagcggccctggcacctccaccgagcccagcgagggcagcgcacccggcagccctgccggcagccccacctccacagaggagggaaccagcaccgagcccagcgaaggcagcgccccaggcaccagcaccgagcctagtgagcaggagattaaacggatcaacaagatcagaagaagacttgtgaaagacagcaacaccaagaaggccggcaagacaggccccatgaaaaccctgctggttagagtgatgacacccgatctgagagagcggctggaaaacctgagaaagaagcctgaaaatatcccccagcccatcagcaatacatctagagccaacctgaataagctgctgaccgattacaccgaaatgaagaaggcgatcctgcatgtgtactgggaagagttccagaaggaccctgtgggcctgatgagccgggtggcccagcctgccagcaagaagatcgatcagaacaagctgaaacctgagatggacgagaagggcaacctgaccaccgccggctttgcctgctctcagtgtggccagcccctgttcgtgtacaagctggagcaggtgtctgagaagggcaaggcttacaccaactacttcggacggtgcaatgtggccgagcacgaaaagctgatcctgctggcccagctgaagcccgagaaggatagcgacgaagccgtgacatatagcctgggaaagtttgggcagagggccctggatttctacagcattcatgtgaccaaggagtccacccaccccgtgaagcccctggcccagatcgccggaaacagatacgcctccggacctgtgggaaaggccctgagcgacgcatgtatgggcacaatcgcctccttcctgtctaagtaccaggacatcatcatcgaacaccagaaggtggtgaagggcaaccagaagagactggagagcctgcgggagctggccggcaaggaaaacctggaataccctagcgtgaccctgccacctcagcctcacaccaaggagggcgttgatgcctacaacgaagtgatcgcccgggtgcgaatgtgggtgaacctgaacctgtggcagaagctgaagctaagcagagatgatgccaagcctctgctgagactgaagggattcccttcctttcctctggtcgagagacaggccaacgaagtggactggtgggacatggtgtgtaacgtgaagaagctgatcaacgagaaaaaggaggatggcaaggtgttttggcagaatctggctggctacaagagacaggaagccctgagaccatacctgagcagcgaggaagatcggaagaagggaaagaaattcgctcggtaccagctgggcgacctgctgctgcacctggaaaagaagcacggcgaggactggggaaaggtgtacgacgaggcctgggagcggattgacaagaaagtggaaggcctgagcaagcacatcaagctggaagaggaacggagaagcgaggacgcccagagcaaggccgccctgaccgactggctgcgggctaaggccagcttcgtgatcgagggcctgaaggaggccgacaaggacgagttctgcagatgcgagctgaagctgcagaagtggtacggggacctgcggggaaagcccttcgccatcgaagccgagaacagcatcctggacatcagcggcttcagcaagcagtacaactgtgccttcatctggcagaaggacggcgtgaagaagctgaacctgtacctgatcatcaactacttcaagggcggcaagctgcggttcaagaagatcaaacctgaagccttcgaagccaacagattctacaccgtgatcaacaaaaagagcggcgagatcgtgcccatggaggtgaacttcaacttcgacgaccccaacctgatcatcctgcctctggcctttggcaagagacagggcagagaattcatctggaacgacctgctgtccctggaaaccggcagcctgaagctggccaacggaagagtgatcgagaagacactgtacaacagaagaacccggcaggatgagcctgccctgttcgtggccctgaccttcgagcggcgggaggtcctggactcctccaatatcaaaccaatgaacctgatcggcgtggcaagaggcgaaaacatccccgccgtgatcgccctgaccgaccccgagggctgcccactgagccggtttaaggatagcctgggaaacccaacccacatcctgagaatcggcgagagctataaggagaagcagcggaccatccaggccaagaaggaggtggagcagcggagagccggcggctacagccggaagtacgccagcaaagccaagaatctggcagacgatatggtgagaaacaccgctagagatctgctgtactacgccgtgacccaggatgccatgctgatcttcgccaacctgagccggggcttcggccggcagggcaagcggaccttcatggccgagagacagtacacacggatggaggactggctgaccgccaagctggcctacgagggcctgagcaagacctacctgtccaagacactggcccagtacacctccaagacatgcagcaactgtgggtttaccatcaccagcgccgactacgacagggtgctggagaagctgaagaagacagcaacaggctggatgaccacaattaacggcaaggagctgaaggtggagggccagattacctactacaacagatacaagagacagaacgtagtcaaggacctgtccgtcgagctggatagactgagcgaagaatctgtgaacaacgacatctcctcctggacaaagggcagaagcggagaagctctgagcctcctgaagaaaagattctcccatagacccgtgcaggagaagttcgtgtgcctgaactgcggcttcgagacacacgcagccgagcaagccgccctgaacatcgccagatcctggctgttcctgcggagccaggagtacaagaaataccagacaaacaagacaaccggcaacaccgataagagagccttcgtcgagacctggcagtccttttaccggaagaagcttaaggaggtgtggaaacctgccgtgcggtctggcggatctggcggaggctcccaggacgtggtgacattcaaggacgtcgccatctacttcagccctgaggaatgggtgcggctgagcgccggacagagagaactgtaccaggaggtgatgctggacaactacgagctggtgaccagcctggatagagagagcaaactgctgtataagatggaccccgaggaagaaagctgcgagggcgtgccatacagctctgccgacagcggcgcccctgatagctcctccacctctgcttgtggcggcccaagcagcggcgcccctcctcccagcggcggcagcccagccggctccccaacctctaccgaggagggcacctctgagtccgccacccccgagagcggccctggcacctccaccgagcccagcgagggcagcgcacccggcagccctgccggcagccccacctccacagaggagggaaccagcaccgagcccagcgaaggcagcgccccaggcaccagcaccgagcctagtgagcaggagattaaacggatcaacaagatcagaagaagacttgtgaaagacagcaacaccaagaaggccggcaagacaggccccatgaaaaccctgctggttagagtgatgacacccgatctgagagagcggctggaaaacctgagaaagaagcctgaaaatatcccccagcccatcagcaatacatctagagccaacctgaataagctgctgaccgattacaccgaaatgaagaaggcgatcctgcatgtgtactgggaagagttccagaaggaccctgtgggcctgatgagccgggtggcccagcctgccagcaagaagatcgatcagaacaagctgaaacctgagatggacgagaagggcaacctgaccaccgccggctttgcctgctctcagtgtggccagcccctgttcgtgtacaagctggagcaggtgtctgagaagggcaaggcttacaccaactacttcggacggtgcaatgtggccgagcacgaaaagctgatcctgctggcccagctgaagcccgagaaggatagcgacgaagccgtgacatatagcctgggaaagtttgggcagagggccctggatttctacagcattcatgtgaccaaggagtccacccaccccgtgaagcccctggcccagatcgccggaaacagatacgcctccggacctgtgggaaaggccctgagcgacgcatgtatgggcacaatcgcctccttcctgtctaagtaccaggacatcatcatcgaacaccagaaggtggtgaagggcaaccagaagagactggagagcctgcgggagctggccggcaaggaaaacctggaataccctagcgtgaccctgccacctcagcctcacaccaaggagggcgttgatgcctacaacgaagtgatcgcccgggtgcgaatgtgggtgaacctgaacctgtggcagaagctgaagctaagcagagatgatgccaagcctctgctgagactgaagggattcccttcctttcctctggtcgagagacaggccaacgaagtggactggtgggacatggtgtgtaacgtgaagaagctgatcaacgagaaaaaggaggatggcaaggtgttttggcagaatctggctggctacaagagacaggaagccctgagaccatacctgagcagcgaggaagatcggaagaagggaaagaaattcgctcggtaccagctgggcgacctgctgctgcacctggaaaagaagcacggcgaggactggggaaaggtgtacgacgaggcctgggagcggattgacaagaaagtggaaggcctgagcaagcacatcaagctggaagaggaacggagaagcgaggacgcccagagcaaggccgccctgaccgactggctgcgggctaaggccagcttcgtgatcgagggcctgaaggaggccgacaaggacgagttctgcagatgcgagctgaagctgcagaagtggtacggggacctgcggggaaagcccttcgccatcgaagccgagaacagcatcctggacatcagcggcttcagcaagcagtacaactgtgccttcatctggcagaaggacggcgtgaagaagctgaacctgtacctgatcatcaactacttcaagggcggcaagctgcggttcaagaagatcaaacctgaagccttcgaagccaacagattctacaccgtgatcaacaaaaagagcggcgagatcgtgcccatggaggtgaacttcaacttcgacgaccccaacctgatcatcctgcctctggcctttggcaagagacagggcagagaattcatctggaacgacctgctgtccctggaaaccggcagcctgaagctggccaacggaagagtgatcgagaagacactgtacaacagaagaacccggcaggatgagcctgccctgttcgtggccctgaccttcgagcggcgggaggtcctggactcctccaatatcaaaccaatgaacctgatcggcgtggcaagaggcgaaaacatccccgccgtgatcgccctgaccgaccccgagggctgcccactgagccggtttaaggatagcctgggaaacccaacccacatcctgagaatcggcgagagctataaggagaagcagcggaccatccaggccaagaaggaggtggagcagcggagagccggcggctacagccggaagtacgccagcaaagccaagaatctggcagacgatatggtgagaaacaccgctagagatctgctgtactacgccgtgacccaggatgccatgctgatcttcgccaacctgagccggggcttcggccggcagggcaagcggaccttcatggccgagagacagtacacacggatggaggactggctgaccgccaagctggcctacgagggcctgagcaagacctacctgtccaagacactggcccagtacacctccaagacatgcagcaactgtgggtttaccatcaccagcgccgactacgacagggtgctggagaagctgaagaagacagcaacaggctggatgaccacaattaacggcaaggagctgaaggtggagggccagattacctactacaacagatacaagagacagaacgtagtcaaggacctgtccgtcgagctggatagactgagcgaagaatctgtgaacaacgacatctcctcctggacaaagggcagaagcggagaagctctgagcctcctgaagaaaagattctcccatagacccgtgcaggagaagttcgtgtgcctgaactgcggcttcgagacacacgcagccgagcaagccgccctgaacatcgccagatcctggctgttcctgcggagccaggagtacaagaaataccagacaaacaagacaaccggcaacaccgataagagagccttcgtcgagacctggcagtccttttaccggaagaagcttaaggaggtgtggaaacctgccgtgcggtctggcggatctggcggaggctccttctcaggagagcgtggccttcgaggacgtggccgtctacttcaccaccaaagagtgggccatcatggtgcccgccgagagagccctgtacagagatgtgatgctggaaaactacgaggccgtggcttttgtggccgtgcctcctacaagcaagcccgctctggtgtcccacctggaacagggcaaggaaagctgcttcatccggcctccaggcgtgctgagcagaagcgactggcgggccggaggatctggctccggcagcggccccaagaaaaagagaaaagtctaagctgccttctgcggggcttgccttctggccatgcccttcttctctcccttgcacctgtacctcttggtctttgaataaagcctgagtaggaaggctagcaaaaaaaaaaaaaaaaaaaaaaaaaaaaaaaaaaaaaaaaaaaaaaaaaaaaaaaaaaaaaaaaaaaaaaaaaaaaaaaa

SEQ ID NO: 18512 - RNA, 9485 nt, synthetic construct
  source 1..9485: mol_type = other RNA
aggaaataagagagaaaagaagagtaagaagaaatataagagccaccatggcccctaagaagaagcgtaaagtgagccggatggaacgcctcgtctacgaggtgcggcagaagtgcagaaacatcgaggacatctgcatctcctgcggatctctgaacgtgaccctggagcacccactgttcatcggcggcatgtgccagaactgtaaaaactgttttctggagtgtgcctatcaatacgacgatgacggctaccagagctactgcaccatctgttgcggcggaagagaggtgctgatgtgtggaaataacaactgctgccggtgcttctgcgtggaatgcgtggacctgctggtgggccccggcgccgcccaggccgctattaaggaagatccttggaactgctacatgtgcggccacaagggcacatacggcctgctgagacggagagaggactggcctagcagactgcagatgttcttcgccaataaccacgaccaggagttcgacccccctaaggtgtaccctcccgtccccgccgagaagagaaagcccatccgggtcctgagcctgttcgatggcatcgccaccggtctgctggtgctgaaggacctgggcatccaggtggataggtacattgcctccgaggtgtgcgaggactccatcaccgtgggaatggtgcgtcatcagggcaagatcatgtacgtgggcgacgtgcggagcgtgacacagaagcatatccaggagtggggccctttcgacctggtgatcggcggcagcccttgcaatgacctgagcatcgtgaacccagcccggaagggcctgtacgagggaaccggcagactgttcttcgagttttacagactgctgcacgacgcccggcctaaggaaggcgacgaccggcccttcttttggctgttcgagaatgtggtggccatgggagtcagcgacaagcgggatattagccggttcctggagagcaaccccgtgatgatcgatgccaaggaagtgagcgccgcccaccgggccagatacttctggggcaatctgcctggcatgaacagacccctggccagcaccgtgaacgacaagctggagctgcaggagtgcctggagcacggccggatcgccaagttcagcaaggtgagaaccatcaccacccgaagcaacagcatcaaacaaggcaaggaccagcactttcctgtgttcatgaacgagaaggaggacatcctgtggtgtaccgagatggagagagtgttcgggttcccagtccactacacagatgtcagcaacatgtctagactggccagacagagactgctgggaagaagctggtccgtccctgtgatcagacacctgttcgcccctctgaaggagtacttcgcctgcgtgagcagcggcaacagcaacgccaacagccggggccccagcttctctagcggcctggtgccactgtccctgagagggagccacatgggccccatggagatctacaaaaccgtgagcgcctggaagcggcagcctgtgcgcgtgctgagcctgtttcggaatatcgataaagtcctgaaaagcctgggattcctggagagcggctctggctccggcggtggcaccctgaagtacgtggaggatgtgacaaacgtggtcagacgggatgtggagaagtggggccccttcgatctggtgtacggcagcacccaacccctgggcagctcttgtgaccggtgccctggctggtacatgtttcagttccaccggatcctgcagtacgccctgccgagacaggagtcccagcggccattcttttggattttcatggacaacttgctgctgaccgaggatgaccaggaaactaccactcggttcctgcagaccgaagccgtgaccctgcaggacgtgagaggccgggactaccagaacgccatgcgggtgtggtccaacatccctggactgaaaagcaagcacgcacctctgacccctaaagaagaggagtacctgcaggcccaggtgcggagcagaagcaagctggacgcccctaaggtggatctgctggtgaagaattgcctcctgcccctgagagagtacttcaagtatttcagccagaatagtctgcccctgggaggcagcggcggcggcgccctggtgacatttgaggacgtcgccgtgcggttcacccaggaggaatgggctctgctggatccttctcagaaaatcctgtaccgggacgtgatgagagagacataccggaatctgacctccgtgggcatcaactgggaatgttgggaccttgaagcctgcttcagaagcctgggaagaaacctgagagtgcaggtggtgaagagaaagtgcgagctgaccaacagcggcccctgcgccgagggcggcccaagcagcggcgcccctcctcccagcggcggcagcccagccggctccccaacctctaccgaggagggcacctctgagtccgccacccccgagagcggccctggcacctccaccgagcccagcgagggcagcgcacccggcagccctgccggcagccccacctccacagaggagggaaccagcaccgagcccagcgaaggcagcgccccaggcaccagcaccgagcctagtgagcaggagattaaacggatcaacaagatcagaagaagacttgtgaaagacagcaacaccaagaaggccggcaagacaggccccatgaaaaccctgctggttagagtgatgacacccgatctgagagagcggctggaaaacctgagaaagaagcctgaaaatatcccccagcccatcagcaatacatctagagccaacctgaataagctgctgaccgattacaccgaaatgaagaaggcgatcctgcatgtgtactgggaagagttccagaaggaccctgtgggcctgatgagccgggtggcccagcctgccagcaagaagatcgatcagaacaagctgaaacctgagatggacgagaagggcaacctgaccaccgccggctttgcctgctctcagtgtggccagcccctgttcgtgtacaagctggagcaggtgtctgagaagggcaaggcttacaccaactacttcggacggtgcaatgtggccgagcacgaaaagctgatcctgctggcccagctgaagcccgagaaggatagcgacgaagccgtgacatatagcctgggaaagtttgggcagagggccctggatttctacagcattcatgtgaccaaggagtccacccaccccgtgaagcccctggcccagatcgccggaaacagatacgcctccggacctgtgggaaaggccctgagcgacgcatgtatgggcacaatcgcctccttcctgtctaagtaccaggacatcatcatcgaacaccagaaggtggtgaagggcaaccagaagagactggagagcctgcgggagctggccggcaaggaaaacctggaataccctagcgtgaccctgccacctcagcctcacaccaaggagggcgttgatgcctacaacgaagtgatcgcccgggtgcgaatgtgggtgaacctgaacctgtggcagaagctgaagctaagcagagatgatgccaagcctctgctgagactgaagggattcccttcctttcctctggtcgagagacaggccaacgaagtggactggtgggacatggtgtgtaacgtgaagaagctgatcaacgagaaaaaggaggatggcaaggtgttttggcagaatctggctggctacaagagacaggaagccctgagaccatacctgagcagcgaggaagatcggaagaagggaaagaaattcgctcggtaccagctgggcgacctgctgctgcacctggaaaagaagcacggcgaggactggggaaaggtgtacgacgaggcctgggagcggattgacaagaaagtggaaggcctgagcaagcacatcaagctggaagaggaacggagaagcgaggacgcccagagcaaggccgccctgaccgactggctgcgggctaaggccagcttcgtgatcgagggcctgaaggaggccgacaaggacgagttctgcagatgcgagctgaagctgcagaagtggtacggggacctgcggggaaagcccttcgccatcgaagccgagaacagcatcctggacatcagcggcttcagcaagcagtacaactgtgccttcatctggcagaaggacggcgtgaagaagctgaacctgtacctgatcatcaactacttcaagggcggcaagctgcggttcaagaagatcaaacctgaagccttcgaagccaacagattctacaccgtgatcaacaaaaagagcggcgagatcgtgcccatggaggtgaacttcaacttcgacgaccccaacctgatcatcctgcctctggcctttggcaagagacagggcagagaattcatctggaacgacctgctgtccctggaaaccggcagcctgaagctggccaacggaagagtgatcgagaagacactgtacaacagaagaacccggcaggatgagcctgccctgttcgtggccctgaccttcgagcggcgggaggtcctggactcctccaatatcaaaccaatgaacctgatcggcgtggcaagaggcgaaaacatccccgccgtgatcgccctgaccgaccccgagggctgcccactgagccggtttaaggatagcctgggaaacccaacccacatcctgagaatcggcgagagctataaggagaagcagcggaccatccaggccaagaaggaggtggagcagcggagagccggcggctacagccggaagtacgccagcaaagccaagaatctggcagacgatatggtgagaaacaccgctagagatctgctgtactacgccgtgacccaggatgccatgctgatcttcgccaacctgagccggggcttcggccggcagggcaagcggaccttcatggccgagagacagtacacacggatggaggactggctgaccgccaagctggcctacgagggcctgagcaagacctacctgtccaagacactggcccagtacacctccaagacatgcagcaactgtgggtttaccatcaccagcgccgactacgacagggtgctggagaagctgaagaagacagcaacaggctggatgaccacaattaacggcaaggagctgaaggtggagggccagattacctactacaacagatacaagagacagaacgtagtcaaggacctgtccgtcgagctggatagactgagcgaagaatctgtgaacaacgacatctcctcctggacaaagggcagaagcggagaagctctgagcctcctgaagaaaagattctcccatagacccgtgcaggagaagttcgtgtgcctgaactgcggcttcgagacacacgcagccgagcaagccgccctgaacatcgccagatcctggctgttcctgcggagccaggagtacaagaaataccagacaaacaagacaaccggcaacaccgataagagagccttcgtcgagacctggcagtccttttaccggaagaagcttaaggaggtgtggaaacctgccgtgcggtctggcggatctggcggaggctcccaggacgtggtgacattcaaggacgtcgccatctacttcagccctgaggaatgggtgcggctgagcgccggacagagagaactgtaccaggaggtgatgctggacaactacgagctggtgaccagcctggatagagagagcaaactgctgtataagatggaccccgaggaagaaagctgcgagggcgtgccatacagctctgccgacagcggcgcccctgatagctcctccacctctgcttgtggcggcccaagcagcggcgcccctcctcccagcggcggcagcccagccggctccccaacctctaccgaggagggcacctctgagtccgccacccccgagagcggccctggcacctccaccgagcccagcgagggcagcgcacccggcagccctgccggcagccccacctccacagaggagggaaccagcaccgagcccagcgaaggcagcgccccaggcaccagcaccgagcctagtgagcaggagattaaacggatcaacaagatcagaagaagacttgtgaaagacagcaacaccaagaaggccggcaagacaggccccatgaaaaccctgctggttagagtgatgacacccgatctgagagagcggctggaaaacctgagaaagaagcctgaaaatatcccccagcccatcagcaatacatctagagccaacctgaataagctgctgaccgattacaccgaaatgaagaaggcgatcctgcatgtgtactgggaagagttccagaaggaccctgtgggcctgatgagccgggtggcccagcctgccagcaagaagatcgatcagaacaagctgaaacctgagatggacgagaagggcaacctgaccaccgccggctttgcctgctctcagtgtggccagcccctgttcgtgtacaagctggagcaggtgtctgagaagggcaaggcttacaccaactacttcggacggtgcaatgtggccgagcacgaaaagctgatcctgctggcccagctgaagcccgagaaggatagcgacgaagccgtgacatatagcctgggaaagtttgggcagagggccctggatttctacagcattcatgtgaccaaggagtccacccaccccgtgaagcccctggcccagatcgccggaaacagatacgcctccggacctgtgggaaaggccctgagcgacgcatgtatgggcacaatcgcctccttcctgtctaagtaccaggacatcatcatcgaacaccagaaggtggtgaagggcaaccagaagagactggagagcctgcgggagctggccggcaaggaaaacctggaataccctagcgtgaccctgccacctcagcctcacaccaaggagggcgttgatgcctacaacgaagtgatcgcccgggtgcgaatgtgggtgaacctgaacctgtggcagaagctgaagctaagcagagatgatgccaagcctctgctgagactgaagggattcccttcctttcctctggtcgagagacaggccaacgaagtggactggtgggacatggtgtgtaacgtgaagaagctgatcaacgagaaaaaggaggatggcaaggtgttttggcagaatctggctggctacaagagacaggaagccctgagaccatacctgagcagcgaggaagatcggaagaagggaaagaaattcgctcggtaccagctgggcgacctgctgctgcacctggaaaagaagcacggcgaggactggggaaaggtgtacgacgaggcctgggagcggattgacaagaaagtggaaggcctgagcaagcacatcaagctggaagaggaacggagaagcgaggacgcccagagcaaggccgccctgaccgactggctgcgggctaaggccagcttcgtgatcgagggcctgaaggaggccgacaaggacgagttctgcagatgcgagctgaagctgcagaagtggtacggggacctgcggggaaagcccttcgccatcgaagccgagaacagcatcctggacatcagcggcttcagcaagcagtacaactgtgccttcatctggcagaaggacggcgtgaagaagctgaacctgtacctgatcatcaactacttcaagggcggcaagctgcggttcaagaagatcaaacctgaagccttcgaagccaacagattctacaccgtgatcaacaaaaagagcggcgagatcgtgcccatggaggtgaacttcaacttcgacgaccccaacctgatcatcctgcctctggcctttggcaagagacagggcagagaattcatctggaacgacctgctgtccctggaaaccggcagcctgaagctggccaacggaagagtgatcgagaagacactgtacaacagaagaacccggcaggatgagcctgccctgttcgtggccctgaccttcgagcggcgggaggtcctggactcctccaatatcaaaccaatgaacctgatcggcgtggcaagaggcgaaaacatccccgccgtgatcgccctgaccgaccccgagggctgcccactgagccggtttaaggatagcctgggaaacccaacccacatcctgagaatcggcgagagctataaggagaagcagcggaccatccaggccaagaaggaggtggagcagcggagagccggcggctacagccggaagtacgccagcaaagccaagaatctggcagacgatatggtgagaaacaccgctagagatctgctgtactacgccgtgacccaggatgccatgctgatcttcgccaacctgagccggggcttcggccggcagggcaagcggaccttcatggccgagagacagtacacacggatggaggactggctgaccgccaagctggcctacgagggcctgagcaagacctacctgtccaagacactggcccagtacacctccaagacatgcagcaactgtgggtttaccatcaccagcgccgactacgacagggtgctggagaagctgaagaagacagcaacaggctggatgaccacaattaacggcaaggagctgaaggtggagggccagattacctactacaacagatacaagagacagaacgtagtcaaggacctgtccgtcgagctggatagactgagcgaagaatctgtgaacaacgacatctcctcctggacaaagggcagaagcggagaagctctgagcctcctgaagaaaagattctcccatagacccgtgcaggagaagttcgtgtgcctgaactgcggcttcgagacacacgcagccgagcaagccgccctgaacatcgccagatcctggctgttcctgcggagccaggagtacaagaaataccagacaaacaagacaaccggcaacaccgataagagagccttcgtcgagacctggcagtccttttaccggaagaagcttaaggaggtgtggaaacctgccgtgcggtctggcggatctggcggaggctccttctaaagcccctatcacattcggcgacctggccatctacttcagccaggaggaatgggagtggctgagccccatccagaaggacctgtacgaggacgtgatgctggaaaactacagaaatctggtgtccctgggcctcagctttagacgccccaacgtgatcaccctgctggaaaagggcaaggccccatggatggtcgagcctgctagacggcggagaggacctgatagcggcagcaaggtgggatctggctccggcagcggccccaagaaaaagagaaaagtctaagctgccttctgcggggcttgccttctggccatgcccttcttctctcccttgcacctgtacctcttggtctttgaataaagcctgagtaggaaggctagcaaaaaaaaaaaaaaaaaaaaaaaaaaaaaaaaaaaaaaaaaaaaaaaaaaaaaaaaaaaaaaaaaaaaaaaaaaaaaaaa

SEQ ID NO: 18513 - RNA, 9485 nt, synthetic construct
  source 1..9485: mol_type = other RNA
aggaaataagagagaaaagaagagtaagaagaaatataagagccaccatggcccctaagaagaagcgtaaagtgagccggatggaacgcctcgtctacgaggtgcggcagaagtgcagaaacatcgaggacatctgcatctcctgcggatctctgaacgtgaccctggagcacccactgttcatcggcggcatgtgccagaactgtaaaaactgttttctggagtgtgcctatcaatacgacgatgacggctaccagagctactgcaccatctgttgcggcggaagagaggtgctgatgtgtggaaataacaactgctgccggtgcttctgcgtggaatgcgtggacctgctggtgggccccggcgccgcccaggccgctattaaggaagatccttggaactgctacatgtgcggccacaagggcacatacggcctgctgagacggagagaggactggcctagcagactgcagatgttcttcgccaataaccacgaccaggagttcgacccccctaaggtgtaccctcccgtccccgccgagaagagaaagcccatccgggtcctgagcctgttcgatggcatcgccaccggtctgctggtgctgaaggacctgggcatccaggtggataggtacattgcctccgaggtgtgcgaggactccatcaccgtgggaatggtgcgtcatcagggcaagatcatgtacgtgggcgacgtgcggagcgtgacacagaagcatatccaggagtggggccctttcgacctggtgatcggcggcagcccttgcaatgacctgagcatcgtgaacccagcccggaagggcctgtacgagggaaccggcagactgttcttcgagttttacagactgctgcacgacgcccggcctaaggaaggcgacgaccggcccttcttttggctgttcgagaatgtggtggccatgggagtcagcgacaagcgggatattagccggttcctggagagcaaccccgtgatgatcgatgccaaggaagtgagcgccgcccaccgggccagatacttctggggcaatctgcctggcatgaacagacccctggccagcaccgtgaacgacaagctggagctgcaggagtgcctggagcacggccggatcgccaagttcagcaaggtgagaaccatcaccacccgaagcaacagcatcaaacaaggcaaggaccagcactttcctgtgttcatgaacgagaaggaggacatcctgtggtgtaccgagatggagagagtgttcgggttcccagtccactacacagatgtcagcaacatgtctagactggccagacagagactgctgggaagaagctggtccgtccctgtgatcagacacctgttcgcccctctgaaggagtacttcgcctgcgtgagcagcggcaacagcaacgccaacagccggggccccagcttctctagcggcctggtgccactgtccctgagagggagccacatgggccccatggagatctacaaaaccgtgagcgcctggaagcggcagcctgtgcgcgtgctgagcctgtttcggaatatcgataaagtcctgaaaagcctgggattcctggagagcggctctggctccggcggtggcaccctgaagtacgtggaggatgtgacaaacgtggtcagacgggatgtggagaagtggggccccttcgatctggtgtacggcagcacccaacccctgggcagctcttgtgaccggtgccctggctggtacatgtttcagttccaccggatcctgcagtacgccctgccgagacaggagtcccagcggccattcttttggattttcatggacaacttgctgctgaccgaggatgaccaggaaactaccactcggttcctgcagaccgaagccgtgaccctgcaggacgtgagaggccgggactaccagaacgccatgcgggtgtggtccaacatccctggactgaaaagcaagcacgcacctctgacccctaaagaagaggagtacctgcaggcccaggtgcggagcagaagcaagctggacgcccctaaggtggatctgctggtgaagaattgcctcctgcccctgagagagtacttcaagtatttcagccagaatagtctgcccctgggaggcagcggcggcggcgccctggtgacatttgaggacgtcgccgtgcggttcacccaggaggaatgggctctgctggatccttctcagaaaatcctgtaccgggacgtgatgagagagacataccggaatctgacctccgtgggcatcaactgggaatgttgggaccttgaagcctgcttcagaagcctgggaagaaacctgagagtgcaggtggtgaagagaaagtgcgagctgaccaacagcggcccctgcgccgagggcggcccaagcagcggcgcccctcctcccagcggcggcagcccagccggctccccaacctctaccgaggagggcacctctgagtccgccacccccgagagcggccctggcacctccaccgagcccagcgagggcagcgcacccggcagccctgccggcagccccacctccacagaggagggaaccagcaccgagcccagcgaaggcagcgccccaggcaccagcaccgagcctagtgagcaggagattaaacggatcaacaagatcagaagaagacttgtgaaagacagcaacaccaagaaggccggcaagacaggccccatgaaaaccctgctggttagagtgatgacacccgatctgagagagcggctggaaaacctgagaaagaagcctgaaaatatcccccagcccatcagcaatacatctagagccaacctgaataagctgctgaccgattacaccgaaatgaagaaggcgatcctgcatgtgtactgggaagagttccagaaggaccctgtgggcctgatgagccgggtggcccagcctgccagcaagaagatcgatcagaacaagctgaaacctgagatggacgagaagggcaacctgaccaccgccggctttgcctgctctcagtgtggccagcccctgttcgtgtacaagctggagcaggtgtctgagaagggcaaggcttacaccaactacttcggacggtgcaatgtggccgagcacgaaaagctgatcctgctggcccagctgaagcccgagaaggatagcgacgaagccgtgacatatagcctgggaaagtttgggcagagggccctggatttctacagcattcatgtgaccaaggagtccacccaccccgtgaagcccctggcccagatcgccggaaacagatacgcctccggacctgtgggaaaggccctgagcgacgcatgtatgggcacaatcgcctccttcctgtctaagtaccaggacatcatcatcgaacaccagaaggtggtgaagggcaaccagaagagactggagagcctgcgggagctggccggcaaggaaaacctggaataccctagcgtgaccctgccacctcagcctcacaccaaggagggcgttgatgcctacaacgaagtgatcgcccgggtgcgaatgtgggtgaacctgaacctgtggcagaagctgaagctaagcagagatgatgccaagcctctgctgagactgaagggattcccttcctttcctctggtcgagagacaggccaacgaagtggactggtgggacatggtgtgtaacgtgaagaagctgatcaacgagaaaaaggaggatggcaaggtgttttggcagaatctggctggctacaagagacaggaagccctgagaccatacctgagcagcgaggaagatcggaagaagggaaagaaattcgctcggtaccagctgggcgacctgctgctgcacctggaaaagaagcacggcgaggactggggaaaggtgtacgacgaggcctgggagcggattgacaagaaagtggaaggcctgagcaagcacatcaagctggaagaggaacggagaagcgaggacgcccagagcaaggccgccctgaccgactggctgcgggctaaggccagcttcgtgatcgagggcctgaaggaggccgacaaggacgagttctgcagatgcgagctgaagctgcagaagtggtacggggacctgcggggaaagcccttcgccatcgaagccgagaacagcatcctggacatcagcggcttcagcaagcagtacaactgtgccttcatctggcagaaggacggcgtgaagaagctgaacctgtacctgatcatcaactacttcaagggcggcaagctgcggttcaagaagatcaaacctgaagccttcgaagccaacagattctacaccgtgatcaacaaaaagagcggcgagatcgtgcccatggaggtgaacttcaacttcgacgaccccaacctgatcatcctgcctctggcctttggcaagagacagggcagagaattcatctggaacgacctgctgtccctggaaaccggcagcctgaagctggccaacggaagagtgatcgagaagacactgtacaacagaagaacccggcaggatgagcctgccctgttcgtggccctgaccttcgagcggcgggaggtcctggactcctccaatatcaaaccaatgaacctgatcggcgtggcaagaggcgaaaacatccccgccgtgatcgccctgaccgaccccgagggctgcccactgagccggtttaaggatagcctgggaaacccaacccacatcctgagaatcggcgagagctataaggagaagcagcggaccatccaggccaagaaggaggtggagcagcggagagccggcggctacagccggaagtacgccagcaaagccaagaatctggcagacgatatggtgagaaacaccgctagagatctgctgtactacgccgtgacccaggatgccatgctgatcttcgccaacctgagccggggcttcggccggcagggcaagcggaccttcatggccgagagacagtacacacggatggaggactggctgaccgccaagctggcctacgagggcctgagcaagacctacctgtccaagacactggcccagtacacctccaagacatgcagcaactgtgggtttaccatcaccagcgccgactacgacagggtgctggagaagctgaagaagacagcaacaggctggatgaccacaattaacggcaaggagctgaaggtggagggccagattacctactacaacagatacaagagacagaacgtagtcaaggacctgtccgtcgagctggatagactgagcgaagaatctgtgaacaacgacatctcctcctggacaaagggcagaagcggagaagctctgagcctcctgaagaaaagattctcccatagacccgtgcaggagaagttcgtgtgcctgaactgcggcttcgagacacacgcagccgagcaagccgccctgaacatcgccagatcctggctgttcctgcggagccaggagtacaagaaataccagacaaacaagacaaccggcaacaccgataagagagccttcgtcgagacctggcagtccttttaccggaagaagcttaaggaggtgtggaaacctgccgtgcggtctggcggatctggcggaggctcccaggacgtggtgacattcaaggacgtcgccatctacttcagccctgaggaatgggtgcggctgagcgccggacagagagaactgtaccaggaggtgatgctggacaactacgagctggtgaccagcctggatagagagagcaaactgctgtataagatggaccccgaggaagaaagctgcgagggcgtgccatacagctctgccgacagcggcgcccctgatagctcctccacctctgcttgtggcggcccaagcagcggcgcccctcctcccagcggcggcagcccagccggctccccaacctctaccgaggagggcacctctgagtccgccacccccgagagcggccctggcacctccaccgagcccagcgagggcagcgcacccggcagccctgccggcagccccacctccacagaggagggaaccagcaccgagcccagcgaaggcagcgccccaggcaccagcaccgagcctagtgagcaggagattaaacggatcaacaagatcagaagaagacttgtgaaagacagcaacaccaagaaggccggcaagacaggccccatgaaaaccctgctggttagagtgatgacacccgatctgagagagcggctggaaaacctgagaaagaagcctgaaaatatcccccagcccatcagcaatacatctagagccaacctgaataagctgctgaccgattacaccgaaatgaagaaggcgatcctgcatgtgtactgggaagagttccagaaggaccctgtgggcctgatgagccgggtggcccagcctgccagcaagaagatcgatcagaacaagctgaaacctgagatggacgagaagggcaacctgaccaccgccggctttgcctgctctcagtgtggccagcccctgttcgtgtacaagctggagcaggtgtctgagaagggcaaggcttacaccaactacttcggacggtgcaatgtggccgagcacgaaaagctgatcctgctggcccagctgaagcccgagaaggatagcgacgaagccgtgacatatagcctgggaaagtttgggcagagggccctggatttctacagcattcatgtgaccaaggagtccacccaccccgtgaagcccctggcccagatcgccggaaacagatacgcctccggacctgtgggaaaggccctgagcgacgcatgtatgggcacaatcgcctccttcctgtctaagtaccaggacatcatcatcgaacaccagaaggtggtgaagggcaaccagaagagactggagagcctgcgggagctggccggcaaggaaaacctggaataccctagcgtgaccctgccacctcagcctcacaccaaggagggcgttgatgcctacaacgaagtgatcgcccgggtgcgaatgtgggtgaacctgaacctgtggcagaagctgaagctaagcagagatgatgccaagcctctgctgagactgaagggattcccttcctttcctctggtcgagagacaggccaacgaagtggactggtgggacatggtgtgtaacgtgaagaagctgatcaacgagaaaaaggaggatggcaaggtgttttggcagaatctggctggctacaagagacaggaagccctgagaccatacctgagcagcgaggaagatcggaagaagggaaagaaattcgctcggtaccagctgggcgacctgctgctgcacctggaaaagaagcacggcgaggactggggaaaggtgtacgacgaggcctgggagcggattgacaagaaagtggaaggcctgagcaagcacatcaagctggaagaggaacggagaagcgaggacgcccagagcaaggccgccctgaccgactggctgcgggctaaggccagcttcgtgatcgagggcctgaaggaggccgacaaggacgagttctgcagatgcgagctgaagctgcagaagtggtacggggacctgcggggaaagcccttcgccatcgaagccgagaacagcatcctggacatcagcggcttcagcaagcagtacaactgtgccttcatctggcagaaggacggcgtgaagaagctgaacctgtacctgatcatcaactacttcaagggcggcaagctgcggttcaagaagatcaaacctgaagccttcgaagccaacagattctacaccgtgatcaacaaaaagagcggcgagatcgtgcccatggaggtgaacttcaacttcgacgaccccaacctgatcatcctgcctctggcctttggcaagagacagggcagagaattcatctggaacgacctgctgtccctggaaaccggcagcctgaagctggccaacggaagagtgatcgagaagacactgtacaacagaagaacccggcaggatgagcctgccctgttcgtggccctgaccttcgagcggcgggaggtcctggactcctccaatatcaaaccaatgaacctgatcggcgtggcaagaggcgaaaacatccccgccgtgatcgccctgaccgaccccgagggctgcccactgagccggtttaaggatagcctgggaaacccaacccacatcctgagaatcggcgagagctataaggagaagcagcggaccatccaggccaagaaggaggtggagcagcggagagccggcggctacagccggaagtacgccagcaaagccaagaatctggcagacgatatggtgagaaacaccgctagagatctgctgtactacgccgtgacccaggatgccatgctgatcttcgccaacctgagccggggcttcggccggcagggcaagcggaccttcatggccgagagacagtacacacggatggaggactggctgaccgccaagctggcctacgagggcctgagcaagacctacctgtccaagacactggcccagtacacctccaagacatgcagcaactgtgggtttaccatcaccagcgccgactacgacagggtgctggagaagctgaagaagacagcaacaggctggatgaccacaattaacggcaaggagctgaaggtggagggccagattacctactacaacagatacaagagacagaacgtagtcaaggacctgtccgtcgagctggatagactgagcgaagaatctgtgaacaacgacatctcctcctggacaaagggcagaagcggagaagctctgagcctcctgaagaaaagattctcccatagacccgtgcaggagaagttcgtgtgcctgaactgcggcttcgagacacacgcagccgagcaagccgccctgaacatcgccagatcctggctgttcctgcggagccaggagtacaagaaataccagacaaacaagacaaccggcaacaccgataagagagccttcgtcgagacctggcagtccttttaccggaagaagcttaaggaggtgtggaaacctgccgtgcggtctggcggatctggcggaggctcctgagatgggcctgctgacattcagagacatcgctatcgagttcagcctggaggaatggcaatgtctggactgcgcccagagaaatctgtacagagatgtgatgctggaaaactaccggaacctggtgtctctgggcatcgccgtgtccaagcccgacctgatcacctgcctcgagcagaacaaggaaagccagaacatcaagcggaacaaaatggtcgccaagcaccctgtgatgcacagccacggatctggctccggcagcggccccaagaaaaagagaaaagtctaagctgccttctgcggggcttgccttctggccatgcccttcttctctcccttgcacctgtacctcttggtctttgaataaagcctgagtaggaaggctagcaaaaaaaaaaaaaaaaaaaaaaaaaaaaaaaaaaaaaaaaaaaaaaaaaaaaaaaaaaaaaaaaaaaaaaaaaaaaaaaa

SEQ ID NO: 18514 - RNA, 9485 nt, synthetic construct
  source 1..9485: mol_type = other RNA
aggaaataagagagaaaagaagagtaagaagaaatataagagccaccatggcccctaagaagaagcgtaaagtgagccggatggaacgcctcgtctacgaggtgcggcagaagtgcagaaacatcgaggacatctgcatctcctgcggatctctgaacgtgaccctggagcacccactgttcatcggcggcatgtgccagaactgtaaaaactgttttctggagtgtgcctatcaatacgacgatgacggctaccagagctactgcaccatctgttgcggcggaagagaggtgctgatgtgtggaaataacaactgctgccggtgcttctgcgtggaatgcgtggacctgctggtgggccccggcgccgcccaggccgctattaaggaagatccttggaactgctacatgtgcggccacaagggcacatacggcctgctgagacggagagaggactggcctagcagactgcagatgttcttcgccaataaccacgaccaggagttcgacccccctaaggtgtaccctcccgtccccgccgagaagagaaagcccatccgggtcctgagcctgttcgatggcatcgccaccggtctgctggtgctgaaggacctgggcatccaggtggataggtacattgcctccgaggtgtgcgaggactccatcaccgtgggaatggtgcgtcatcagggcaagatcatgtacgtgggcgacgtgcggagcgtgacacagaagcatatccaggagtggggccctttcgacctggtgatcggcggcagcccttgcaatgacctgagcatcgtgaacccagcccggaagggcctgtacgagggaaccggcagactgttcttcgagttttacagactgctgcacgacgcccggcctaaggaaggcgacgaccggcccttcttttggctgttcgagaatgtggtggccatgggagtcagcgacaagcgggatattagccggttcctggagagcaaccccgtgatgatcgatgccaaggaagtgagcgccgcccaccgggccagatacttctggggcaatctgcctggcatgaacagacccctggccagcaccgtgaacgacaagctggagctgcaggagtgcctggagcacggccggatcgccaagttcagcaaggtgagaaccatcaccacccgaagcaacagcatcaaacaaggcaaggaccagcactttcctgtgttcatgaacgagaaggaggacatcctgtggtgtaccgagatggagagagtgttcgggttcccagtccactacacagatgtcagcaacatgtctagactggccagacagagactgctgggaagaagctggtccgtccctgtgatcagacacctgttcgcccctctgaaggagtacttcgcctgcgtgagcagcggcaacagcaacgccaacagccggggccccagcttctctagcggcctggtgccactgtccctgagagggagccacatgggccccatggagatctacaaaaccgtgagcgcctggaagcggcagcctgtgcgcgtgctgagcctgtttcggaatatcgataaagtcctgaaaagcctgggattcctggagagcggctctggctccggcggtggcaccctgaagtacgtggaggatgtgacaaacgtggtcagacgggatgtggagaagtggggccccttcgatctggtgtacggcagcacccaacccctgggcagctcttgtgaccggtgccctggctggtacatgtttcagttccaccggatcctgcagtacgccctgccgagacaggagtcccagcggccattcttttggattttcatggacaacttgctgctgaccgaggatgaccaggaaactaccactcggttcctgcagaccgaagccgtgaccctgcaggacgtgagaggccgggactaccagaacgccatgcgggtgtggtccaacatccctggactgaaaagcaagcacgcacctctgacccctaaagaagaggagtacctgcaggcccaggtgcggagcagaagcaagctggacgcccctaaggtggatctgctggtgaagaattgcctcctgcccctgagagagtacttcaagtatttcagccagaatagtctgcccctgggaggcagcggcggcggcgccctggtgacatttgaggacgtcgccgtgcggttcacccaggaggaatgggctctgctggatccttctcagaaaatcctgtaccgggacgtgatgagagagacataccggaatctgacctccgtgggcatcaactgggaatgttgggaccttgaagcctgcttcagaagcctgggaagaaacctgagagtgcaggtggtgaagagaaagtgcgagctgaccaacagcggcccctgcgccgagggcggcccaagcagcggcgcccctcctcccagcggcggcagcccagccggctccccaacctctaccgaggagggcacctctgagtccgccacccccgagagcggccctggcacctccaccgagcccagcgagggcagcgcacccggcagccctgccggcagccccacctccacagaggagggaaccagcaccgagcccagcgaaggcagcgccccaggcaccagcaccgagcctagtgagcaggagattaaacggatcaacaagatcagaagaagacttgtgaaagacagcaacaccaagaaggccggcaagacaggccccatgaaaaccctgctggttagagtgatgacacccgatctgagagagcggctggaaaacctgagaaagaagcctgaaaatatcccccagcccatcagcaatacatctagagccaacctgaataagctgctgaccgattacaccgaaatgaagaaggcgatcctgcatgtgtactgggaagagttccagaaggaccctgtgggcctgatgagccgggtggcccagcctgccagcaagaagatcgatcagaacaagctgaaacctgagatggacgagaagggcaacctgaccaccgccggctttgcctgctctcagtgtggccagcccctgttcgtgtacaagctggagcaggtgtctgagaagggcaaggcttacaccaactacttcggacggtgcaatgtggccgagcacgaaaagctgatcctgctggcccagctgaagcccgagaaggatagcgacgaagccgtgacatatagcctgggaaagtttgggcagagggccctggatttctacagcattcatgtgaccaaggagtccacccaccccgtgaagcccctggcccagatcgccggaaacagatacgcctccggacctgtgggaaaggccctgagcgacgcatgtatgggcacaatcgcctccttcctgtctaagtaccaggacatcatcatcgaacaccagaaggtggtgaagggcaaccagaagagactggagagcctgcgggagctggccggcaaggaaaacctggaataccctagcgtgaccctgccacctcagcctcacaccaaggagggcgttgatgcctacaacgaagtgatcgcccgggtgcgaatgtgggtgaacctgaacctgtggcagaagctgaagctaagcagagatgatgccaagcctctgctgagactgaagggattcccttcctttcctctggtcgagagacaggccaacgaagtggactggtgggacatggtgtgtaacgtgaagaagctgatcaacgagaaaaaggaggatggcaaggtgttttggcagaatctggctggctacaagagacaggaagccctgagaccatacctgagcagcgaggaagatcggaagaagggaaagaaattcgctcggtaccagctgggcgacctgctgctgcacctggaaaagaagcacggcgaggactggggaaaggtgtacgacgaggcctgggagcggattgacaagaaagtggaaggcctgagcaagcacatcaagctggaagaggaacggagaagcgaggacgcccagagcaaggccgccctgaccgactggctgcgggctaaggccagcttcgtgatcgagggcctgaaggaggccgacaaggacgagttctgcagatgcgagctgaagctgcagaagtggtacggggacctgcggggaaagcccttcgccatcgaagccgagaacagcatcctggacatcagcggcttcagcaagcagtacaactgtgccttcatctggcagaaggacggcgtgaagaagctgaacctgtacctgatcatcaactacttcaagggcggcaagctgcggttcaagaagatcaaacctgaagccttcgaagccaacagattctacaccgtgatcaacaaaaagagcggcgagatcgtgcccatggaggtgaacttcaacttcgacgaccccaacctgatcatcctgcctctggcctttggcaagagacagggcagagaattcatctggaacgacctgctgtccctggaaaccggcagcctgaagctggccaacggaagagtgatcgagaagacactgtacaacagaagaacccggcaggatgagcctgccctgttcgtggccctgaccttcgagcggcgggaggtcctggactcctccaatatcaaaccaatgaacctgatcggcgtggcaagaggcgaaaacatccccgccgtgatcgccctgaccgaccccgagggctgcccactgagccggtttaaggatagcctgggaaacccaacccacatcctgagaatcggcgagagctataaggagaagcagcggaccatccaggccaagaaggaggtggagcagcggagagccggcggctacagccggaagtacgccagcaaagccaagaatctggcagacgatatggtgagaaacaccgctagagatctgctgtactacgccgtgacccaggatgccatgctgatcttcgccaacctgagccggggcttcggccggcagggcaagcggaccttcatggccgagagacagtacacacggatggaggactggctgaccgccaagctggcctacgagggcctgagcaagacctacctgtccaagacactggcccagtacacctccaagacatgcagcaactgtgggtttaccatcaccagcgccgactacgacagggtgctggagaagctgaagaagacagcaacaggctggatgaccacaattaacggcaaggagctgaaggtggagggccagattacctactacaacagatacaagagacagaacgtagtcaaggacctgtccgtcgagctggatagactgagcgaagaatctgtgaacaacgacatctcctcctggacaaagggcagaagcggagaagctctgagcctcctgaagaaaagattctcccatagacccgtgcaggagaagttcgtgtgcctgaactgcggcttcgagacacacgcagccgagcaagccgccctgaacatcgccagatcctggctgttcctgcggagccaggagtacaagaaataccagacaaacaagacaaccggcaacaccgataagagagccttcgtcgagacctggcagtccttttaccggaagaagcttaaggaggtgtggaaacctgccgtgcggtctggcggatctggcggaggctcccaggacgtggtgacattcaaggacgtcgccatctacttcagccctgaggaatgggtgcggctgagcgccggacagagagaactgtaccaggaggtgatgctggacaactacgagctggtgaccagcctggatagagagagcaaactgctgtataagatggaccccgaggaagaaagctgcgagggcgtgccatacagctctgccgacagcggcgcccctgatagctcctccacctctgcttgtggcggcccaagcagcggcgcccctcctcccagcggcggcagcccagccggctccccaacctctaccgaggagggcacctctgagtccgccacccccgagagcggccctggcacctccaccgagcccagcgagggcagcgcacccggcagccctgccggcagccccacctccacagaggagggaaccagcaccgagcccagcgaaggcagcgccccaggcaccagcaccgagcctagtgagcaggagattaaacggatcaacaagatcagaagaagacttgtgaaagacagcaacaccaagaaggccggcaagacaggccccatgaaaaccctgctggttagagtgatgacacccgatctgagagagcggctggaaaacctgagaaagaagcctgaaaatatcccccagcccatcagcaatacatctagagccaacctgaataagctgctgaccgattacaccgaaatgaagaaggcgatcctgcatgtgtactgggaagagttccagaaggaccctgtgggcctgatgagccgggtggcccagcctgccagcaagaagatcgatcagaacaagctgaaacctgagatggacgagaagggcaacctgaccaccgccggctttgcctgctctcagtgtggccagcccctgttcgtgtacaagctggagcaggtgtctgagaagggcaaggcttacaccaactacttcggacggtgcaatgtggccgagcacgaaaagctgatcctgctggcccagctgaagcccgagaaggatagcgacgaagccgtgacatatagcctgggaaagtttgggcagagggccctggatttctacagcattcatgtgaccaaggagtccacccaccccgtgaagcccctggcccagatcgccggaaacagatacgcctccggacctgtgggaaaggccctgagcgacgcatgtatgggcacaatcgcctccttcctgtctaagtaccaggacatcatcatcgaacaccagaaggtggtgaagggcaaccagaagagactggagagcctgcgggagctggccggcaaggaaaacctggaataccctagcgtgaccctgccacctcagcctcacaccaaggagggcgttgatgcctacaacgaagtgatcgcccgggtgcgaatgtgggtgaacctgaacctgtggcagaagctgaagctaagcagagatgatgccaagcctctgctgagactgaagggattcccttcctttcctctggtcgagagacaggccaacgaagtggactggtgggacatggtgtgtaacgtgaagaagctgatcaacgagaaaaaggaggatggcaaggtgttttggcagaatctggctggctacaagagacaggaagccctgagaccatacctgagcagcgaggaagatcggaagaagggaaagaaattcgctcggtaccagctgggcgacctgctgctgcacctggaaaagaagcacggcgaggactggggaaaggtgtacgacgaggcctgggagcggattgacaagaaagtggaaggcctgagcaagcacatcaagctggaagaggaacggagaagcgaggacgcccagagcaaggccgccctgaccgactggctgcgggctaaggccagcttcgtgatcgagggcctgaaggaggccgacaaggacgagttctgcagatgcgagctgaagctgcagaagtggtacggggacctgcggggaaagcccttcgccatcgaagccgagaacagcatcctggacatcagcggcttcagcaagcagtacaactgtgccttcatctggcagaaggacggcgtgaagaagctgaacctgtacctgatcatcaactacttcaagggcggcaagctgcggttcaagaagatcaaacctgaagccttcgaagccaacagattctacaccgtgatcaacaaaaagagcggcgagatcgtgcccatggaggtgaacttcaacttcgacgaccccaacctgatcatcctgcctctggcctttggcaagagacagggcagagaattcatctggaacgacctgctgtccctggaaaccggcagcctgaagctggccaacggaagagtgatcgagaagacactgtacaacagaagaacccggcaggatgagcctgccctgttcgtggccctgaccttcgagcggcgggaggtcctggactcctccaatatcaaaccaatgaacctgatcggcgtggcaagaggcgaaaacatccccgccgtgatcgccctgaccgaccccgagggctgcccactgagccggtttaaggatagcctgggaaacccaacccacatcctgagaatcggcgagagctataaggagaagcagcggaccatccaggccaagaaggaggtggagcagcggagagccggcggctacagccggaagtacgccagcaaagccaagaatctggcagacgatatggtgagaaacaccgctagagatctgctgtactacgccgtgacccaggatgccatgctgatcttcgccaacctgagccggggcttcggccggcagggcaagcggaccttcatggccgagagacagtacacacggatggaggactggctgaccgccaagctggcctacgagggcctgagcaagacctacctgtccaagacactggcccagtacacctccaagacatgcagcaactgtgggtttaccatcaccagcgccgactacgacagggtgctggagaagctgaagaagacagcaacaggctggatgaccacaattaacggcaaggagctgaaggtggagggccagattacctactacaacagatacaagagacagaacgtagtcaaggacctgtccgtcgagctggatagactgagcgaagaatctgtgaacaacgacatctcctcctggacaaagggcagaagcggagaagctctgagcctcctgaagaaaagattctcccatagacccgtgcaggagaagttcgtgtgcctgaactgcggcttcgagacacacgcagccgagcaagccgccctgaacatcgccagatcctggctgttcctgcggagccaggagtacaagaaataccagacaaacaagacaaccggcaacaccgataagagagccttcgtcgagacctggcagtccttttaccggaagaagcttaaggaggtgtggaaacctgccgtgcggtctggcggatctggcggaggctcctctgctgaccttcgaggacgtcgccgtgtccttcagcgaggaagaatgggagctgctcgatcctcctcagaaaaccctgtacaacgacgtgatgcaagagaactacgagacagtgatctctctgggcctgaagctgaagaacgacaccggaaatgatcagcccatcagcatcagcgccctggaaatgcaggccagcggcagcaaggtgctgcggaaggccagaatgaaagtggctcagaagacaggatctggctccggcagcggccccaagaaaaagagaaaagtctaagctgccttctgcggggcttgccttctggccatgcccttcttctctcccttgcacctgtacctcttggtctttgaataaagcctgagtaggaaggctagcaaaaaaaaaaaaaaaaaaaaaaaaaaaaaaaaaaaaaaaaaaaaaaaaaaaaaaaaaaaaaaaaaaaaaaaaaaaaaaaa

SEQ ID NO: 18515 - RNA, 9512 nt, synthetic construct
  source 1..9512: mol_type = other RNA
aggaaataagagagaaaagaagagtaagaagaaatataagagccaccatggcccctaagaagaagcgtaaagtgagccggatggaacgcctcgtctacgaggtgcggcagaagtgcagaaacatcgaggacatctgcatctcctgcggatctctgaacgtgaccctggagcacccactgttcatcggcggcatgtgccagaactgtaaaaactgttttctggagtgtgcctatcaatacgacgatgacggctaccagagctactgcaccatctgttgcggcggaagagaggtgctgatgtgtggaaataacaactgctgccggtgcttctgcgtggaatgcgtggacctgctggtgggccccggcgccgcccaggccgctattaaggaagatccttggaactgctacatgtgcggccacaagggcacatacggcctgctgagacggagagaggactggcctagcagactgcagatgttcttcgccaataaccacgaccaggagttcgacccccctaaggtgtaccctcccgtccccgccgagaagagaaagcccatccgggtcctgagcctgttcgatggcatcgccaccggtctgctggtgctgaaggacctgggcatccaggtggataggtacattgcctccgaggtgtgcgaggactccatcaccgtgggaatggtgcgtcatcagggcaagatcatgtacgtgggcgacgtgcggagcgtgacacagaagcatatccaggagtggggccctttcgacctggtgatcggcggcagcccttgcaatgacctgagcatcgtgaacccagcccggaagggcctgtacgagggaaccggcagactgttcttcgagttttacagactgctgcacgacgcccggcctaaggaaggcgacgaccggcccttcttttggctgttcgagaatgtggtggccatgggagtcagcgacaagcgggatattagccggttcctggagagcaaccccgtgatgatcgatgccaaggaagtgagcgccgcccaccgggccagatacttctggggcaatctgcctggcatgaacagacccctggccagcaccgtgaacgacaagctggagctgcaggagtgcctggagcacggccggatcgccaagttcagcaaggtgagaaccatcaccacccgaagcaacagcatcaaacaaggcaaggaccagcactttcctgtgttcatgaacgagaaggaggacatcctgtggtgtaccgagatggagagagtgttcgggttcccagtccactacacagatgtcagcaacatgtctagactggccagacagagactgctgggaagaagctggtccgtccctgtgatcagacacctgttcgcccctctgaaggagtacttcgcctgcgtgagcagcggcaacagcaacgccaacagccggggccccagcttctctagcggcctggtgccactgtccctgagagggagccacatgggccccatggagatctacaaaaccgtgagcgcctggaagcggcagcctgtgcgcgtgctgagcctgtttcggaatatcgataaagtcctgaaaagcctgggattcctggagagcggctctggctccggcggtggcaccctgaagtacgtggaggatgtgacaaacgtggtcagacgggatgtggagaagtggggccccttcgatctggtgtacggcagcacccaacccctgggcagctcttgtgaccggtgccctggctggtacatgtttcagttccaccggatcctgcagtacgccctgccgagacaggagtcccagcggccattcttttggattttcatggacaacttgctgctgaccgaggatgaccaggaaactaccactcggttcctgcagaccgaagccgtgaccctgcaggacgtgagaggccgggactaccagaacgccatgcgggtgtggtccaacatccctggactgaaaagcaagcacgcacctctgacccctaaagaagaggagtacctgcaggcccaggtgcggagcagaagcaagctggacgcccctaaggtggatctgctggtgaagaattgcctcctgcccctgagagagtacttcaagtatttcagccagaatagtctgcccctgggaggcagcggcggcggcgccctggtgacatttgaggacgtcgccgtgcggttcacccaggaggaatgggctctgctggatccttctcagaaaatcctgtaccgggacgtgatgagagagacataccggaatctgacctccgtgggcatcaactgggaatgttgggaccttgaagcctgcttcagaagcctgggaagaaacctgagagtgcaggtggtgaagagaaagtgcgagctgaccaacagcggcccctgcgccgagggcggcccaagcagcggcgcccctcctcccagcggcggcagcccagccggctccccaacctctaccgaggagggcacctctgagtccgccacccccgagagcggccctggcacctccaccgagcccagcgagggcagcgcacccggcagccctgccggcagccccacctccacagaggagggaaccagcaccgagcccagcgaaggcagcgccccaggcaccagcaccgagcctagtgagcaggagattaaacggatcaacaagatcagaagaagacttgtgaaagacagcaacaccaagaaggccggcaagacaggccccatgaaaaccctgctggttagagtgatgacacccgatctgagagagcggctggaaaacctgagaaagaagcctgaaaatatcccccagcccatcagcaatacatctagagccaacctgaataagctgctgaccgattacaccgaaatgaagaaggcgatcctgcatgtgtactgggaagagttccagaaggaccctgtgggcctgatgagccgggtggcccagcctgccagcaagaagatcgatcagaacaagctgaaacctgagatggacgagaagggcaacctgaccaccgccggctttgcctgctctcagtgtggccagcccctgttcgtgtacaagctggagcaggtgtctgagaagggcaaggcttacaccaactacttcggacggtgcaatgtggccgagcacgaaaagctgatcctgctggcccagctgaagcccgagaaggatagcgacgaagccgtgacatatagcctgggaaagtttgggcagagggccctggatttctacagcattcatgtgaccaaggagtccacccaccccgtgaagcccctggcccagatcgccggaaacagatacgcctccggacctgtgggaaaggccctgagcgacgcatgtatgggcacaatcgcctccttcctgtctaagtaccaggacatcatcatcgaacaccagaaggtggtgaagggcaaccagaagagactggagagcctgcgggagctggccggcaaggaaaacctggaataccctagcgtgaccctgccacctcagcctcacaccaaggagggcgttgatgcctacaacgaagtgatcgcccgggtgcgaatgtgggtgaacctgaacctgtggcagaagctgaagctaagcagagatgatgccaagcctctgctgagactgaagggattcccttcctttcctctggtcgagagacaggccaacgaagtggactggtgggacatggtgtgtaacgtgaagaagctgatcaacgagaaaaaggaggatggcaaggtgttttggcagaatctggctggctacaagagacaggaagccctgagaccatacctgagcagcgaggaagatcggaagaagggaaagaaattcgctcggtaccagctgggcgacctgctgctgcacctggaaaagaagcacggcgaggactggggaaaggtgtacgacgaggcctgggagcggattgacaagaaagtggaaggcctgagcaagcacatcaagctggaagaggaacggagaagcgaggacgcccagagcaaggccgccctgaccgactggctgcgggctaaggccagcttcgtgatcgagggcctgaaggaggccgacaaggacgagttctgcagatgcgagctgaagctgcagaagtggtacggggacctgcggggaaagcccttcgccatcgaagccgagaacagcatcctggacatcagcggcttcagcaagcagtacaactgtgccttcatctggcagaaggacggcgtgaagaagctgaacctgtacctgatcatcaactacttcaagggcggcaagctgcggttcaagaagatcaaacctgaagccttcgaagccaacagattctacaccgtgatcaacaaaaagagcggcgagatcgtgcccatggaggtgaacttcaacttcgacgaccccaacctgatcatcctgcctctggcctttggcaagagacagggcagagaattcatctggaacgacctgctgtccctggaaaccggcagcctgaagctggccaacggaagagtgatcgagaagacactgtacaacagaagaacccggcaggatgagcctgccctgttcgtggccctgaccttcgagcggcgggaggtcctggactcctccaatatcaaaccaatgaacctgatcggcgtggcaagaggcgaaaacatccccgccgtgatcgccctgaccgaccccgagggctgcccactgagccggtttaaggatagcctgggaaacccaacccacatcctgagaatcggcgagagctataaggagaagcagcggaccatccaggccaagaaggaggtggagcagcggagagccggcggctacagccggaagtacgccagcaaagccaagaatctggcagacgatatggtgagaaacaccgctagagatctgctgtactacgccgtgacccaggatgccatgctgatcttcgccaacctgagccggggcttcggccggcagggcaagcggaccttcatggccgagagacagtacacacggatggaggactggctgaccgccaagctggcctacgagggcctgagcaagacctacctgtccaagacactggcccagtacacctccaagacatgcagcaactgtgggtttaccatcaccagcgccgactacgacagggtgctggagaagctgaagaagacagcaacaggctggatgaccacaattaacggcaaggagctgaaggtggagggccagattacctactacaacagatacaagagacagaacgtagtcaaggacctgtccgtcgagctggatagactgagcgaagaatctgtgaacaacgacatctcctcctggacaaagggcagaagcggagaagctctgagcctcctgaagaaaagattctcccatagacccgtgcaggagaagttcgtgtgcctgaactgcggcttcgagacacacgcagccgagcaagccgccctgaacatcgccagatcctggctgttcctgcggagccaggagtacaagaaataccagacaaacaagacaaccggcaacaccgataagagagccttcgtcgagacctggcagtccttttaccggaagaagcttaaggaggtgtggaaacctgccgtgcggtctggcggatctggcggaggctccgtcgccttccgggacgtgatcgtggacttcacccaggaggaatggcagcagctgaagcctgctcaaaaggacctgtacagagatgtgatgatggaaatctactggaatctggtgtctctggacctggaaaccgagggagatatgaacgagcctgaccccgagaaagacagctgggaggatagaacaagcatcgtggttgtggaaggcctgatgcggaacggcgcccagggctacgcctgcgagaaggccggcatccagggctgtagagtgggcggcccaagcagcggcgcccctcctcccagcggcggcagcccagccggctccccaacctctaccgaggagggcacctctgagtccgccacccccgagagcggccctggcacctccaccgagcccagcgagggcagcgcacccggcagccctgccggcagccccacctccacagaggagggaaccagcaccgagcccagcgaaggcagcgccccaggcaccagcaccgagcctagtgagcaggagattaaacggatcaacaagatcagaagaagacttgtgaaagacagcaacaccaagaaggccggcaagacaggccccatgaaaaccctgctggttagagtgatgacacccgatctgagagagcggctggaaaacctgagaaagaagcctgaaaatatcccccagcccatcagcaatacatctagagccaacctgaataagctgctgaccgattacaccgaaatgaagaaggcgatcctgcatgtgtactgggaagagttccagaaggaccctgtgggcctgatgagccgggtggcccagcctgccagcaagaagatcgatcagaacaagctgaaacctgagatggacgagaagggcaacctgaccaccgccggctttgcctgctctcagtgtggccagcccctgttcgtgtacaagctggagcaggtgtctgagaagggcaaggcttacaccaactacttcggacggtgcaatgtggccgagcacgaaaagctgatcctgctggcccagctgaagcccgagaaggatagcgacgaagccgtgacatatagcctgggaaagtttgggcagagggccctggatttctacagcattcatgtgaccaaggagtccacccaccccgtgaagcccctggcccagatcgccggaaacagatacgcctccggacctgtgggaaaggccctgagcgacgcatgtatgggcacaatcgcctccttcctgtctaagtaccaggacatcatcatcgaacaccagaaggtggtgaagggcaaccagaagagactggagagcctgcgggagctggccggcaaggaaaacctggaataccctagcgtgaccctgccacctcagcctcacaccaaggagggcgttgatgcctacaacgaagtgatcgcccgggtgcgaatgtgggtgaacctgaacctgtggcagaagctgaagctaagcagagatgatgccaagcctctgctgagactgaagggattcccttcctttcctctggtcgagagacaggccaacgaagtggactggtgggacatggtgtgtaacgtgaagaagctgatcaacgagaaaaaggaggatggcaaggtgttttggcagaatctggctggctacaagagacaggaagccctgagaccatacctgagcagcgaggaagatcggaagaagggaaagaaattcgctcggtaccagctgggcgacctgctgctgcacctggaaaagaagcacggcgaggactggggaaaggtgtacgacgaggcctgggagcggattgacaagaaagtggaaggcctgagcaagcacatcaagctggaagaggaacggagaagcgaggacgcccagagcaaggccgccctgaccgactggctgcgggctaaggccagcttcgtgatcgagggcctgaaggaggccgacaaggacgagttctgcagatgcgagctgaagctgcagaagtggtacggggacctgcggggaaagcccttcgccatcgaagccgagaacagcatcctggacatcagcggcttcagcaagcagtacaactgtgccttcatctggcagaaggacggcgtgaagaagctgaacctgtacctgatcatcaactacttcaagggcggcaagctgcggttcaagaagatcaaacctgaagccttcgaagccaacagattctacaccgtgatcaacaaaaagagcggcgagatcgtgcccatggaggtgaacttcaacttcgacgaccccaacctgatcatcctgcctctggcctttggcaagagacagggcagagaattcatctggaacgacctgctgtccctggaaaccggcagcctgaagctggccaacggaagagtgatcgagaagacactgtacaacagaagaacccggcaggatgagcctgccctgttcgtggccctgaccttcgagcggcgggaggtcctggactcctccaatatcaaaccaatgaacctgatcggcgtggcaagaggcgaaaacatccccgccgtgatcgccctgaccgaccccgagggctgcccactgagccggtttaaggatagcctgggaaacccaacccacatcctgagaatcggcgagagctataaggagaagcagcggaccatccaggccaagaaggaggtggagcagcggagagccggcggctacagccggaagtacgccagcaaagccaagaatctggcagacgatatggtgagaaacaccgctagagatctgctgtactacgccgtgacccaggatgccatgctgatcttcgccaacctgagccggggcttcggccggcagggcaagcggaccttcatggccgagagacagtacacacggatggaggactggctgaccgccaagctggcctacgagggcctgagcaagacctacctgtccaagacactggcccagtacacctccaagacatgcagcaactgtgggtttaccatcaccagcgccgactacgacagggtgctggagaagctgaagaagacagcaacaggctggatgaccacaattaacggcaaggagctgaaggtggagggccagattacctactacaacagatacaagagacagaacgtagtcaaggacctgtccgtcgagctggatagactgagcgaagaatctgtgaacaacgacatctcctcctggacaaagggcagaagcggagaagctctgagcctcctgaagaaaagattctcccatagacccgtgcaggagaagttcgtgtgcctgaactgcggcttcgagacacacgcagccgagcaagccgccctgaacatcgccagatcctggctgttcctgcggagccaggagtacaagaaataccagacaaacaagacaaccggcaacaccgataagagagccttcgtcgagacctggcagtccttttaccggaagaagcttaaggaggtgtggaaacctgccgtgcggtctggcggatctggcggaggctcctgccctggtgacatttgaggacgtcgccgtgcggttcacccaggaggaatgggctctgctggatccttctcagaaaatcctgtaccgggacgtgatgagagagacataccggaatctgacctccgtgggcatcaactgggaatgttgggaccttgaagcctgcttcagaagcctgggaagaaacctgagagtgcaggtggtgaagagaaagtgcgagctgaccaacagcggcccctgcgccgagggatctggctccggcagcggccccaagaaaaagagaaaagtctaagctgccttctgcggggcttgccttctggccatgcccttcttctctcccttgcacctgtacctcttggtctttgaataaagcctgagtaggaaggctagcaaaaaaaaaaaaaaaaaaaaaaaaaaaaaaaaaaaaaaaaaaaaaaaaaaaaaaaaaaaaaaaaaaaaaaaaaaaaaaaa

SEQ ID NO: 18516 - RNA, 9512 nt, synthetic construct
  source 1..9512: mol_type = other RNA
aggaaataagagagaaaagaagagtaagaagaaatataagagccaccatggcccctaagaagaagcgtaaagtgagccggatggaacgcctcgtctacgaggtgcggcagaagtgcagaaacatcgaggacatctgcatctcctgcggatctctgaacgtgaccctggagcacccactgttcatcggcggcatgtgccagaactgtaaaaactgttttctggagtgtgcctatcaatacgacgatgacggctaccagagctactgcaccatctgttgcggcggaagagaggtgctgatgtgtggaaataacaactgctgccggtgcttctgcgtggaatgcgtggacctgctggtgggccccggcgccgcccaggccgctattaaggaagatccttggaactgctacatgtgcggccacaagggcacatacggcctgctgagacggagagaggactggcctagcagactgcagatgttcttcgccaataaccacgaccaggagttcgacccccctaaggtgtaccctcccgtccccgccgagaagagaaagcccatccgggtcctgagcctgttcgatggcatcgccaccggtctgctggtgctgaaggacctgggcatccaggtggataggtacattgcctccgaggtgtgcgaggactccatcaccgtgggaatggtgcgtcatcagggcaagatcatgtacgtgggcgacgtgcggagcgtgacacagaagcatatccaggagtggggccctttcgacctggtgatcggcggcagcccttgcaatgacctgagcatcgtgaacccagcccggaagggcctgtacgagggaaccggcagactgttcttcgagttttacagactgctgcacgacgcccggcctaaggaaggcgacgaccggcccttcttttggctgttcgagaatgtggtggccatgggagtcagcgacaagcgggatattagccggttcctggagagcaaccccgtgatgatcgatgccaaggaagtgagcgccgcccaccgggccagatacttctggggcaatctgcctggcatgaacagacccctggccagcaccgtgaacgacaagctggagctgcaggagtgcctggagcacggccggatcgccaagttcagcaaggtgagaaccatcaccacccgaagcaacagcatcaaacaaggcaaggaccagcactttcctgtgttcatgaacgagaaggaggacatcctgtggtgtaccgagatggagagagtgttcgggttcccagtccactacacagatgtcagcaacatgtctagactggccagacagagactgctgggaagaagctggtccgtccctgtgatcagacacctgttcgcccctctgaaggagtacttcgcctgcgtgagcagcggcaacagcaacgccaacagccggggccccagcttctctagcggcctggtgccactgtccctgagagggagccacatgggccccatggagatctacaaaaccgtgagcgcctggaagcggcagcctgtgcgcgtgctgagcctgtttcggaatatcgataaagtcctgaaaagcctgggattcctggagagcggctctggctccggcggtggcaccctgaagtacgtggaggatgtgacaaacgtggtcagacgggatgtggagaagtggggccccttcgatctggtgtacggcagcacccaacccctgggcagctcttgtgaccggtgccctggctggtacatgtttcagttccaccggatcctgcagtacgccctgccgagacaggagtcccagcggccattcttttggattttcatggacaacttgctgctgaccgaggatgaccaggaaactaccactcggttcctgcagaccgaagccgtgaccctgcaggacgtgagaggccgggactaccagaacgccatgcgggtgtggtccaacatccctggactgaaaagcaagcacgcacctctgacccctaaagaagaggagtacctgcaggcccaggtgcggagcagaagcaagctggacgcccctaaggtggatctgctggtgaagaattgcctcctgcccctgagagagtacttcaagtatttcagccagaatagtctgcccctgggaggcagcggcggcggcgccctggtgacatttgaggacgtcgccgtgcggttcacccaggaggaatgggctctgctggatccttctcagaaaatcctgtaccgggacgtgatgagagagacataccggaatctgacctccgtgggcatcaactgggaatgttgggaccttgaagcctgcttcagaagcctgggaagaaacctgagagtgcaggtggtgaagagaaagtgcgagctgaccaacagcggcccctgcgccgagggcggcccaagcagcggcgcccctcctcccagcggcggcagcccagccggctccccaacctctaccgaggagggcacctctgagtccgccacccccgagagcggccctggcacctccaccgagcccagcgagggcagcgcacccggcagccctgccggcagccccacctccacagaggagggaaccagcaccgagcccagcgaaggcagcgccccaggcaccagcaccgagcctagtgagcaggagattaaacggatcaacaagatcagaagaagacttgtgaaagacagcaacaccaagaaggccggcaagacaggccccatgaaaaccctgctggttagagtgatgacacccgatctgagagagcggctggaaaacctgagaaagaagcctgaaaatatcccccagcccatcagcaatacatctagagccaacctgaataagctgctgaccgattacaccgaaatgaagaaggcgatcctgcatgtgtactgggaagagttccagaaggaccctgtgggcctgatgagccgggtggcccagcctgccagcaagaagatcgatcagaacaagctgaaacctgagatggacgagaagggcaacctgaccaccgccggctttgcctgctctcagtgtggccagcccctgttcgtgtacaagctggagcaggtgtctgagaagggcaaggcttacaccaactacttcggacggtgcaatgtggccgagcacgaaaagctgatcctgctggcccagctgaagcccgagaaggatagcgacgaagccgtgacatatagcctgggaaagtttgggcagagggccctggatttctacagcattcatgtgaccaaggagtccacccaccccgtgaagcccctggcccagatcgccggaaacagatacgcctccggacctgtgggaaaggccctgagcgacgcatgtatgggcacaatcgcctccttcctgtctaagtaccaggacatcatcatcgaacaccagaaggtggtgaagggcaaccagaagagactggagagcctgcgggagctggccggcaaggaaaacctggaataccctagcgtgaccctgccacctcagcctcacaccaaggagggcgttgatgcctacaacgaagtgatcgcccgggtgcgaatgtgggtgaacctgaacctgtggcagaagctgaagctaagcagagatgatgccaagcctctgctgagactgaagggattcccttcctttcctctggtcgagagacaggccaacgaagtggactggtgggacatggtgtgtaacgtgaagaagctgatcaacgagaaaaaggaggatggcaaggtgttttggcagaatctggctggctacaagagacaggaagccctgagaccatacctgagcagcgaggaagatcggaagaagggaaagaaattcgctcggtaccagctgggcgacctgctgctgcacctggaaaagaagcacggcgaggactggggaaaggtgtacgacgaggcctgggagcggattgacaagaaagtggaaggcctgagcaagcacatcaagctggaagaggaacggagaagcgaggacgcccagagcaaggccgccctgaccgactggctgcgggctaaggccagcttcgtgatcgagggcctgaaggaggccgacaaggacgagttctgcagatgcgagctgaagctgcagaagtggtacggggacctgcggggaaagcccttcgccatcgaagccgagaacagcatcctggacatcagcggcttcagcaagcagtacaactgtgccttcatctggcagaaggacggcgtgaagaagctgaacctgtacctgatcatcaactacttcaagggcggcaagctgcggttcaagaagatcaaacctgaagccttcgaagccaacagattctacaccgtgatcaacaaaaagagcggcgagatcgtgcccatggaggtgaacttcaacttcgacgaccccaacctgatcatcctgcctctggcctttggcaagagacagggcagagaattcatctggaacgacctgctgtccctggaaaccggcagcctgaagctggccaacggaagagtgatcgagaagacactgtacaacagaagaacccggcaggatgagcctgccctgttcgtggccctgaccttcgagcggcgggaggtcctggactcctccaatatcaaaccaatgaacctgatcggcgtggcaagaggcgaaaacatccccgccgtgatcgccctgaccgaccccgagggctgcccactgagccggtttaaggatagcctgggaaacccaacccacatcctgagaatcggcgagagctataaggagaagcagcggaccatccaggccaagaaggaggtggagcagcggagagccggcggctacagccggaagtacgccagcaaagccaagaatctggcagacgatatggtgagaaacaccgctagagatctgctgtactacgccgtgacccaggatgccatgctgatcttcgccaacctgagccggggcttcggccggcagggcaagcggaccttcatggccgagagacagtacacacggatggaggactggctgaccgccaagctggcctacgagggcctgagcaagacctacctgtccaagacactggcccagtacacctccaagacatgcagcaactgtgggtttaccatcaccagcgccgactacgacagggtgctggagaagctgaagaagacagcaacaggctggatgaccacaattaacggcaaggagctgaaggtggagggccagattacctactacaacagatacaagagacagaacgtagtcaaggacctgtccgtcgagctggatagactgagcgaagaatctgtgaacaacgacatctcctcctggacaaagggcagaagcggagaagctctgagcctcctgaagaaaagattctcccatagacccgtgcaggagaagttcgtgtgcctgaactgcggcttcgagacacacgcagccgagcaagccgccctgaacatcgccagatcctggctgttcctgcggagccaggagtacaagaaataccagacaaacaagacaaccggcaacaccgataagagagccttcgtcgagacctggcagtccttttaccggaagaagcttaaggaggtgtggaaacctgccgtgcggtctggcggatctggcggaggctccgtcgccttccgggacgtgatcgtggacttcacccaggaggaatggcagcagctgaagcctgctcaaaaggacctgtacagagatgtgatgatggaaatctactggaatctggtgtctctggacctggaaaccgagggagatatgaacgagcctgaccccgagaaagacagctgggaggatagaacaagcatcgtggttgtggaaggcctgatgcggaacggcgcccagggctacgcctgcgagaaggccggcatccagggctgtagagtgggcggcccaagcagcggcgcccctcctcccagcggcggcagcccagccggctccccaacctctaccgaggagggcacctctgagtccgccacccccgagagcggccctggcacctccaccgagcccagcgagggcagcgcacccggcagccctgccggcagccccacctccacagaggagggaaccagcaccgagcccagcgaaggcagcgccccaggcaccagcaccgagcctagtgagcaggagattaaacggatcaacaagatcagaagaagacttgtgaaagacagcaacaccaagaaggccggcaagacaggccccatgaaaaccctgctggttagagtgatgacacccgatctgagagagcggctggaaaacctgagaaagaagcctgaaaatatcccccagcccatcagcaatacatctagagccaacctgaataagctgctgaccgattacaccgaaatgaagaaggcgatcctgcatgtgtactgggaagagttccagaaggaccctgtgggcctgatgagccgggtggcccagcctgccagcaagaagatcgatcagaacaagctgaaacctgagatggacgagaagggcaacctgaccaccgccggctttgcctgctctcagtgtggccagcccctgttcgtgtacaagctggagcaggtgtctgagaagggcaaggcttacaccaactacttcggacggtgcaatgtggccgagcacgaaaagctgatcctgctggcccagctgaagcccgagaaggatagcgacgaagccgtgacatatagcctgggaaagtttgggcagagggccctggatttctacagcattcatgtgaccaaggagtccacccaccccgtgaagcccctggcccagatcgccggaaacagatacgcctccggacctgtgggaaaggccctgagcgacgcatgtatgggcacaatcgcctccttcctgtctaagtaccaggacatcatcatcgaacaccagaaggtggtgaagggcaaccagaagagactggagagcctgcgggagctggccggcaaggaaaacctggaataccctagcgtgaccctgccacctcagcctcacaccaaggagggcgttgatgcctacaacgaagtgatcgcccgggtgcgaatgtgggtgaacctgaacctgtggcagaagctgaagctaagcagagatgatgccaagcctctgctgagactgaagggattcccttcctttcctctggtcgagagacaggccaacgaagtggactggtgggacatggtgtgtaacgtgaagaagctgatcaacgagaaaaaggaggatggcaaggtgttttggcagaatctggctggctacaagagacaggaagccctgagaccatacctgagcagcgaggaagatcggaagaagggaaagaaattcgctcggtaccagctgggcgacctgctgctgcacctggaaaagaagcacggcgaggactggggaaaggtgtacgacgaggcctgggagcggattgacaagaaagtggaaggcctgagcaagcacatcaagctggaagaggaacggagaagcgaggacgcccagagcaaggccgccctgaccgactggctgcgggctaaggccagcttcgtgatcgagggcctgaaggaggccgacaaggacgagttctgcagatgcgagctgaagctgcagaagtggtacggggacctgcggggaaagcccttcgccatcgaagccgagaacagcatcctggacatcagcggcttcagcaagcagtacaactgtgccttcatctggcagaaggacggcgtgaagaagctgaacctgtacctgatcatcaactacttcaagggcggcaagctgcggttcaagaagatcaaacctgaagccttcgaagccaacagattctacaccgtgatcaacaaaaagagcggcgagatcgtgcccatggaggtgaacttcaacttcgacgaccccaacctgatcatcctgcctctggcctttggcaagagacagggcagagaattcatctggaacgacctgctgtccctggaaaccggcagcctgaagctggccaacggaagagtgatcgagaagacactgtacaacagaagaacccggcaggatgagcctgccctgttcgtggccctgaccttcgagcggcgggaggtcctggactcctccaatatcaaaccaatgaacctgatcggcgtggcaagaggcgaaaacatccccgccgtgatcgccctgaccgaccccgagggctgcccactgagccggtttaaggatagcctgggaaacccaacccacatcctgagaatcggcgagagctataaggagaagcagcggaccatccaggccaagaaggaggtggagcagcggagagccggcggctacagccggaagtacgccagcaaagccaagaatctggcagacgatatggtgagaaacaccgctagagatctgctgtactacgccgtgacccaggatgccatgctgatcttcgccaacctgagccggggcttcggccggcagggcaagcggaccttcatggccgagagacagtacacacggatggaggactggctgaccgccaagctggcctacgagggcctgagcaagacctacctgtccaagacactggcccagtacacctccaagacatgcagcaactgtgggtttaccatcaccagcgccgactacgacagggtgctggagaagctgaagaagacagcaacaggctggatgaccacaattaacggcaaggagctgaaggtggagggccagattacctactacaacagatacaagagacagaacgtagtcaaggacctgtccgtcgagctggatagactgagcgaagaatctgtgaacaacgacatctcctcctggacaaagggcagaagcggagaagctctgagcctcctgaagaaaagattctcccatagacccgtgcaggagaagttcgtgtgcctgaactgcggcttcgagacacacgcagccgagcaagccgccctgaacatcgccagatcctggctgttcctgcggagccaggagtacaagaaataccagacaaacaagacaaccggcaacaccgataagagagccttcgtcgagacctggcagtccttttaccggaagaagcttaaggaggtgtggaaacctgccgtgcggtctggcggatctggcggaggctccttctacacctgtgaccttcgaggatgtggtggtctacttcaccgccgctgagtgggtgcacctgacaaactggcaaagagatttttatcaggccgtgatgatggaaacctacgagctggtggccagcgtggctggcgacggcgttccaatggccgaggacgaggaaggcggagtggaaagacccgtgtggcagtacatccccagaggcaagcggcggagaaagacccctcagcctcgcgccgacggatctggctccggcagcggccccaagaaaaagagaaaagtctaagctgccttctgcggggcttgccttctggccatgcccttcttctctcccttgcacctgtacctcttggtctttgaataaagcctgagtaggaaggctagcaaaaaaaaaaaaaaaaaaaaaaaaaaaaaaaaaaaaaaaaaaaaaaaaaaaaaaaaaaaaaaaaaaaaaaaaaaaaaaaa

SEQ ID NO: 18517 - RNA, 9512 nt, synthetic construct
  source 1..9512: mol_type = other RNA
aggaaataagagagaaaagaagagtaagaagaaatataagagccaccatggcccctaagaagaagcgtaaagtgagccggatggaacgcctcgtctacgaggtgcggcagaagtgcagaaacatcgaggacatctgcatctcctgcggatctctgaacgtgaccctggagcacccactgttcatcggcggcatgtgccagaactgtaaaaactgttttctggagtgtgcctatcaatacgacgatgacggctaccagagctactgcaccatctgttgcggcggaagagaggtgctgatgtgtggaaataacaactgctgccggtgcttctgcgtggaatgcgtggacctgctggtgggccccggcgccgcccaggccgctattaaggaagatccttggaactgctacatgtgcggccacaagggcacatacggcctgctgagacggagagaggactggcctagcagactgcagatgttcttcgccaataaccacgaccaggagttcgacccccctaaggtgtaccctcccgtccccgccgagaagagaaagcccatccgggtcctgagcctgttcgatggcatcgccaccggtctgctggtgctgaaggacctgggcatccaggtggataggtacattgcctccgaggtgtgcgaggactccatcaccgtgggaatggtgcgtcatcagggcaagatcatgtacgtgggcgacgtgcggagcgtgacacagaagcatatccaggagtggggccctttcgacctggtgatcggcggcagcccttgcaatgacctgagcatcgtgaacccagcccggaagggcctgtacgagggaaccggcagactgttcttcgagttttacagactgctgcacgacgcccggcctaaggaaggcgacgaccggcccttcttttggctgttcgagaatgtggtggccatgggagtcagcgacaagcgggatattagccggttcctggagagcaaccccgtgatgatcgatgccaaggaagtgagcgccgcccaccgggccagatacttctggggcaatctgcctggcatgaacagacccctggccagcaccgtgaacgacaagctggagctgcaggagtgcctggagcacggccggatcgccaagttcagcaaggtgagaaccatcaccacccgaagcaacagcatcaaacaaggcaaggaccagcactttcctgtgttcatgaacgagaaggaggacatcctgtggtgtaccgagatggagagagtgttcgggttcccagtccactacacagatgtcagcaacatgtctagactggccagacagagactgctgggaagaagctggtccgtccctgtgatcagacacctgttcgcccctctgaaggagtacttcgcctgcgtgagcagcggcaacagcaacgccaacagccggggccccagcttctctagcggcctggtgccactgtccctgagagggagccacatgggccccatggagatctacaaaaccgtgagcgcctggaagcggcagcctgtgcgcgtgctgagcctgtttcggaatatcgataaagtcctgaaaagcctgggattcctggagagcggctctggctccggcggtggcaccctgaagtacgtggaggatgtgacaaacgtggtcagacgggatgtggagaagtggggccccttcgatctggtgtacggcagcacccaacccctgggcagctcttgtgaccggtgccctggctggtacatgtttcagttccaccggatcctgcagtacgccctgccgagacaggagtcccagcggccattcttttggattttcatggacaacttgctgctgaccgaggatgaccaggaaactaccactcggttcctgcagaccgaagccgtgaccctgcaggacgtgagaggccgggactaccagaacgccatgcgggtgtggtccaacatccctggactgaaaagcaagcacgcacctctgacccctaaagaagaggagtacctgcaggcccaggtgcggagcagaagcaagctggacgcccctaaggtggatctgctggtgaagaattgcctcctgcccctgagagagtacttcaagtatttcagccagaatagtctgcccctgggaggcagcggcggcggcgccctggtgacatttgaggacgtcgccgtgcggttcacccaggaggaatgggctctgctggatccttctcagaaaatcctgtaccgggacgtgatgagagagacataccggaatctgacctccgtgggcatcaactgggaatgttgggaccttgaagcctgcttcagaagcctgggaagaaacctgagagtgcaggtggtgaagagaaagtgcgagctgaccaacagcggcccctgcgccgagggcggcccaagcagcggcgcccctcctcccagcggcggcagcccagccggctccccaacctctaccgaggagggcacctctgagtccgccacccccgagagcggccctggcacctccaccgagcccagcgagggcagcgcacccggcagccctgccggcagccccacctccacagaggagggaaccagcaccgagcccagcgaaggcagcgccccaggcaccagcaccgagcctagtgagcaggagattaaacggatcaacaagatcagaagaagacttgtgaaagacagcaacaccaagaaggccggcaagacaggccccatgaaaaccctgctggttagagtgatgacacccgatctgagagagcggctggaaaacctgagaaagaagcctgaaaatatcccccagcccatcagcaatacatctagagccaacctgaataagctgctgaccgattacaccgaaatgaagaaggcgatcctgcatgtgtactgggaagagttccagaaggaccctgtgggcctgatgagccgggtggcccagcctgccagcaagaagatcgatcagaacaagctgaaacctgagatggacgagaagggcaacctgaccaccgccggctttgcctgctctcagtgtggccagcccctgttcgtgtacaagctggagcaggtgtctgagaagggcaaggcttacaccaactacttcggacggtgcaatgtggccgagcacgaaaagctgatcctgctggcccagctgaagcccgagaaggatagcgacgaagccgtgacatatagcctgggaaagtttgggcagagggccctggatttctacagcattcatgtgaccaaggagtccacccaccccgtgaagcccctggcccagatcgccggaaacagatacgcctccggacctgtgggaaaggccctgagcgacgcatgtatgggcacaatcgcctccttcctgtctaagtaccaggacatcatcatcgaacaccagaaggtggtgaagggcaaccagaagagactggagagcctgcgggagctggccggcaaggaaaacctggaataccctagcgtgaccctgccacctcagcctcacaccaaggagggcgttgatgcctacaacgaagtgatcgcccgggtgcgaatgtgggtgaacctgaacctgtggcagaagctgaagctaagcagagatgatgccaagcctctgctgagactgaagggattcccttcctttcctctggtcgagagacaggccaacgaagtggactggtgggacatggtgtgtaacgtgaagaagctgatcaacgagaaaaaggaggatggcaaggtgttttggcagaatctggctggctacaagagacaggaagccctgagaccatacctgagcagcgaggaagatcggaagaagggaaagaaattcgctcggtaccagctgggcgacctgctgctgcacctggaaaagaagcacggcgaggactggggaaaggtgtacgacgaggcctgggagcggattgacaagaaagtggaaggcctgagcaagcacatcaagctggaagaggaacggagaagcgaggacgcccagagcaaggccgccctgaccgactggctgcgggctaaggccagcttcgtgatcgagggcctgaaggaggccgacaaggacgagttctgcagatgcgagctgaagctgcagaagtggtacggggacctgcggggaaagcccttcgccatcgaagccgagaacagcatcctggacatcagcggcttcagcaagcagtacaactgtgccttcatctggcagaaggacggcgtgaagaagctgaacctgtacctgatcatcaactacttcaagggcggcaagctgcggttcaagaagatcaaacctgaagccttcgaagccaacagattctacaccgtgatcaacaaaaagagcggcgagatcgtgcccatggaggtgaacttcaacttcgacgaccccaacctgatcatcctgcctctggcctttggcaagagacagggcagagaattcatctggaacgacctgctgtccctggaaaccggcagcctgaagctggccaacggaagagtgatcgagaagacactgtacaacagaagaacccggcaggatgagcctgccctgttcgtggccctgaccttcgagcggcgggaggtcctggactcctccaatatcaaaccaatgaacctgatcggcgtggcaagaggcgaaaacatccccgccgtgatcgccctgaccgaccccgagggctgcccactgagccggtttaaggatagcctgggaaacccaacccacatcctgagaatcggcgagagctataaggagaagcagcggaccatccaggccaagaaggaggtggagcagcggagagccggcggctacagccggaagtacgccagcaaagccaagaatctggcagacgatatggtgagaaacaccgctagagatctgctgtactacgccgtgacccaggatgccatgctgatcttcgccaacctgagccggggcttcggccggcagggcaagcggaccttcatggccgagagacagtacacacggatggaggactggctgaccgccaagctggcctacgagggcctgagcaagacctacctgtccaagacactggcccagtacacctccaagacatgcagcaactgtgggtttaccatcaccagcgccgactacgacagggtgctggagaagctgaagaagacagcaacaggctggatgaccacaattaacggcaaggagctgaaggtggagggccagattacctactacaacagatacaagagacagaacgtagtcaaggacctgtccgtcgagctggatagactgagcgaagaatctgtgaacaacgacatctcctcctggacaaagggcagaagcggagaagctctgagcctcctgaagaaaagattctcccatagacccgtgcaggagaagttcgtgtgcctgaactgcggcttcgagacacacgcagccgagcaagccgccctgaacatcgccagatcctggctgttcctgcggagccaggagtacaagaaataccagacaaacaagacaaccggcaacaccgataagagagccttcgtcgagacctggcagtccttttaccggaagaagcttaaggaggtgtggaaacctgccgtgcggtctggcggatctggcggaggctccgtcgccttccgggacgtgatcgtggacttcacccaggaggaatggcagcagctgaagcctgctcaaaaggacctgtacagagatgtgatgatggaaatctactggaatctggtgtctctggacctggaaaccgagggagatatgaacgagcctgaccccgagaaagacagctgggaggatagaacaagcatcgtggttgtggaaggcctgatgcggaacggcgcccagggctacgcctgcgagaaggccggcatccagggctgtagagtgggcggcccaagcagcggcgcccctcctcccagcggcggcagcccagccggctccccaacctctaccgaggagggcacctctgagtccgccacccccgagagcggccctggcacctccaccgagcccagcgagggcagcgcacccggcagccctgccggcagccccacctccacagaggagggaaccagcaccgagcccagcgaaggcagcgccccaggcaccagcaccgagcctagtgagcaggagattaaacggatcaacaagatcagaagaagacttgtgaaagacagcaacaccaagaaggccggcaagacaggccccatgaaaaccctgctggttagagtgatgacacccgatctgagagagcggctggaaaacctgagaaagaagcctgaaaatatcccccagcccatcagcaatacatctagagccaacctgaataagctgctgaccgattacaccgaaatgaagaaggcgatcctgcatgtgtactgggaagagttccagaaggaccctgtgggcctgatgagccgggtggcccagcctgccagcaagaagatcgatcagaacaagctgaaacctgagatggacgagaagggcaacctgaccaccgccggctttgcctgctctcagtgtggccagcccctgttcgtgtacaagctggagcaggtgtctgagaagggcaaggcttacaccaactacttcggacggtgcaatgtggccgagcacgaaaagctgatcctgctggcccagctgaagcccgagaaggatagcgacgaagccgtgacatatagcctgggaaagtttgggcagagggccctggatttctacagcattcatgtgaccaaggagtccacccaccccgtgaagcccctggcccagatcgccggaaacagatacgcctccggacctgtgggaaaggccctgagcgacgcatgtatgggcacaatcgcctccttcctgtctaagtaccaggacatcatcatcgaacaccagaaggtggtgaagggcaaccagaagagactggagagcctgcgggagctggccggcaaggaaaacctggaataccctagcgtgaccctgccacctcagcctcacaccaaggagggcgttgatgcctacaacgaagtgatcgcccgggtgcgaatgtgggtgaacctgaacctgtggcagaagctgaagctaagcagagatgatgccaagcctctgctgagactgaagggattcccttcctttcctctggtcgagagacaggccaacgaagtggactggtgggacatggtgtgtaacgtgaagaagctgatcaacgagaaaaaggaggatggcaaggtgttttggcagaatctggctggctacaagagacaggaagccctgagaccatacctgagcagcgaggaagatcggaagaagggaaagaaattcgctcggtaccagctgggcgacctgctgctgcacctggaaaagaagcacggcgaggactggggaaaggtgtacgacgaggcctgggagcggattgacaagaaagtggaaggcctgagcaagcacatcaagctggaagaggaacggagaagcgaggacgcccagagcaaggccgccctgaccgactggctgcgggctaaggccagcttcgtgatcgagggcctgaaggaggccgacaaggacgagttctgcagatgcgagctgaagctgcagaagtggtacggggacctgcggggaaagcccttcgccatcgaagccgagaacagcatcctggacatcagcggcttcagcaagcagtacaactgtgccttcatctggcagaaggacggcgtgaagaagctgaacctgtacctgatcatcaactacttcaagggcggcaagctgcggttcaagaagatcaaacctgaagccttcgaagccaacagattctacaccgtgatcaacaaaaagagcggcgagatcgtgcccatggaggtgaacttcaacttcgacgaccccaacctgatcatcctgcctctggcctttggcaagagacagggcagagaattcatctggaacgacctgctgtccctggaaaccggcagcctgaagctggccaacggaagagtgatcgagaagacactgtacaacagaagaacccggcaggatgagcctgccctgttcgtggccctgaccttcgagcggcgggaggtcctggactcctccaatatcaaaccaatgaacctgatcggcgtggcaagaggcgaaaacatccccgccgtgatcgccctgaccgaccccgagggctgcccactgagccggtttaaggatagcctgggaaacccaacccacatcctgagaatcggcgagagctataaggagaagcagcggaccatccaggccaagaaggaggtggagcagcggagagccggcggctacagccggaagtacgccagcaaagccaagaatctggcagacgatatggtgagaaacaccgctagagatctgctgtactacgccgtgacccaggatgccatgctgatcttcgccaacctgagccggggcttcggccggcagggcaagcggaccttcatggccgagagacagtacacacggatggaggactggctgaccgccaagctggcctacgagggcctgagcaagacctacctgtccaagacactggcccagtacacctccaagacatgcagcaactgtgggtttaccatcaccagcgccgactacgacagggtgctggagaagctgaagaagacagcaacaggctggatgaccacaattaacggcaaggagctgaaggtggagggccagattacctactacaacagatacaagagacagaacgtagtcaaggacctgtccgtcgagctggatagactgagcgaagaatctgtgaacaacgacatctcctcctggacaaagggcagaagcggagaagctctgagcctcctgaagaaaagattctcccatagacccgtgcaggagaagttcgtgtgcctgaactgcggcttcgagacacacgcagccgagcaagccgccctgaacatcgccagatcctggctgttcctgcggagccaggagtacaagaaataccagacaaacaagacaaccggcaacaccgataagagagccttcgtcgagacctggcagtccttttaccggaagaagcttaaggaggtgtggaaacctgccgtgcggtctggcggatctggcggaggctcctcaggacgtggtgacattcaaggacgtcgccatctacttcagccctgaggaatgggtgcggctgagcgccggacagagagaactgtaccaggaggtgatgctggacaactacgagctggtgaccagcctggatagagagagcaaactgctgtataagatggaccccgaggaagaaagctgcgagggcgtgccatacagctctgccgacagcggcgcccctgatagctcctccacctctgcttgtggatctggctccggcagcggccccaagaaaaagagaaaagtctaagctgccttctgcggggcttgccttctggccatgcccttcttctctcccttgcacctgtacctcttggtctttgaataaagcctgagtaggaaggctagcaaaaaaaaaaaaaaaaaaaaaaaaaaaaaaaaaaaaaaaaaaaaaaaaaaaaaaaaaaaaaaaaaaaaaaaaaaaaaaaa

SEQ ID NO: 18518 - RNA, 9521 nt, synthetic construct
  source 1..9521: mol_type = other RNA
aggaaataagagagaaaagaagagtaagaagaaatataagagccaccatggcccctaagaagaagcgtaaagtgagccggatggaacgcctcgtctacgaggtgcggcagaagtgcagaaacatcgaggacatctgcatctcctgcggatctctgaacgtgaccctggagcacccactgttcatcggcggcatgtgccagaactgtaaaaactgttttctggagtgtgcctatcaatacgacgatgacggctaccagagctactgcaccatctgttgcggcggaagagaggtgctgatgtgtggaaataacaactgctgccggtgcttctgcgtggaatgcgtggacctgctggtgggccccggcgccgcccaggccgctattaaggaagatccttggaactgctacatgtgcggccacaagggcacatacggcctgctgagacggagagaggactggcctagcagactgcagatgttcttcgccaataaccacgaccaggagttcgacccccctaaggtgtaccctcccgtccccgccgagaagagaaagcccatccgggtcctgagcctgttcgatggcatcgccaccggtctgctggtgctgaaggacctgggcatccaggtggataggtacattgcctccgaggtgtgcgaggactccatcaccgtgggaatggtgcgtcatcagggcaagatcatgtacgtgggcgacgtgcggagcgtgacacagaagcatatccaggagtggggccctttcgacctggtgatcggcggcagcccttgcaatgacctgagcatcgtgaacccagcccggaagggcctgtacgagggaaccggcagactgttcttcgagttttacagactgctgcacgacgcccggcctaaggaaggcgacgaccggcccttcttttggctgttcgagaatgtggtggccatgggagtcagcgacaagcgggatattagccggttcctggagagcaaccccgtgatgatcgatgccaaggaagtgagcgccgcccaccgggccagatacttctggggcaatctgcctggcatgaacagacccctggccagcaccgtgaacgacaagctggagctgcaggagtgcctggagcacggccggatcgccaagttcagcaaggtgagaaccatcaccacccgaagcaacagcatcaaacaaggcaaggaccagcactttcctgtgttcatgaacgagaaggaggacatcctgtggtgtaccgagatggagagagtgttcgggttcccagtccactacacagatgtcagcaacatgtctagactggccagacagagactgctgggaagaagctggtccgtccctgtgatcagacacctgttcgcccctctgaaggagtacttcgcctgcgtgagcagcggcaacagcaacgccaacagccggggccccagcttctctagcggcctggtgccactgtccctgagagggagccacatgggccccatggagatctacaaaaccgtgagcgcctggaagcggcagcctgtgcgcgtgctgagcctgtttcggaatatcgataaagtcctgaaaagcctgggattcctggagagcggctctggctccggcggtggcaccctgaagtacgtggaggatgtgacaaacgtggtcagacgggatgtggagaagtggggccccttcgatctggtgtacggcagcacccaacccctgggcagctcttgtgaccggtgccctggctggtacatgtttcagttccaccggatcctgcagtacgccctgccgagacaggagtcccagcggccattcttttggattttcatggacaacttgctgctgaccgaggatgaccaggaaactaccactcggttcctgcagaccgaagccgtgaccctgcaggacgtgagaggccgggactaccagaacgccatgcgggtgtggtccaacatccctggactgaaaagcaagcacgcacctctgacccctaaagaagaggagtacctgcaggcccaggtgcggagcagaagcaagctggacgcccctaaggtggatctgctggtgaagaattgcctcctgcccctgagagagtacttcaagtatttcagccagaatagtctgcccctgggaggcagcggcggcggcgccctggtgacatttgaggacgtcgccgtgcggttcacccaggaggaatgggctctgctggatccttctcagaaaatcctgtaccgggacgtgatgagagagacataccggaatctgacctccgtgggcatcaactgggaatgttgggaccttgaagcctgcttcagaagcctgggaagaaacctgagagtgcaggtggtgaagagaaagtgcgagctgaccaacagcggcccctgcgccgagggcggcccaagcagcggcgcccctcctcccagcggcggcagcccagccggctccccaacctctaccgaggagggcacctctgagtccgccacccccgagagcggccctggcacctccaccgagcccagcgagggcagcgcacccggcagccctgccggcagccccacctccacagaggagggaaccagcaccgagcccagcgaaggcagcgccccaggcaccagcaccgagcctagtgagcaggagattaaacggatcaacaagatcagaagaagacttgtgaaagacagcaacaccaagaaggccggcaagacaggccccatgaaaaccctgctggttagagtgatgacacccgatctgagagagcggctggaaaacctgagaaagaagcctgaaaatatcccccagcccatcagcaatacatctagagccaacctgaataagctgctgaccgattacaccgaaatgaagaaggcgatcctgcatgtgtactgggaagagttccagaaggaccctgtgggcctgatgagccgggtggcccagcctgccagcaagaagatcgatcagaacaagctgaaacctgagatggacgagaagggcaacctgaccaccgccggctttgcctgctctcagtgtggccagcccctgttcgtgtacaagctggagcaggtgtctgagaagggcaaggcttacaccaactacttcggacggtgcaatgtggccgagcacgaaaagctgatcctgctggcccagctgaagcccgagaaggatagcgacgaagccgtgacatatagcctgggaaagtttgggcagagggccctggatttctacagcattcatgtgaccaaggagtccacccaccccgtgaagcccctggcccagatcgccggaaacagatacgcctccggacctgtgggaaaggccctgagcgacgcatgtatgggcacaatcgcctccttcctgtctaagtaccaggacatcatcatcgaacaccagaaggtggtgaagggcaaccagaagagactggagagcctgcgggagctggccggcaaggaaaacctggaataccctagcgtgaccctgccacctcagcctcacaccaaggagggcgttgatgcctacaacgaagtgatcgcccgggtgcgaatgtgggtgaacctgaacctgtggcagaagctgaagctaagcagagatgatgccaagcctctgctgagactgaagggattcccttcctttcctctggtcgagagacaggccaacgaagtggactggtgggacatggtgtgtaacgtgaagaagctgatcaacgagaaaaaggaggatggcaaggtgttttggcagaatctggctggctacaagagacaggaagccctgagaccatacctgagcagcgaggaagatcggaagaagggaaagaaattcgctcggtaccagctgggcgacctgctgctgcacctggaaaagaagcacggcgaggactggggaaaggtgtacgacgaggcctgggagcggattgacaagaaagtggaaggcctgagcaagcacatcaagctggaagaggaacggagaagcgaggacgcccagagcaaggccgccctgaccgactggctgcgggctaaggccagcttcgtgatcgagggcctgaaggaggccgacaaggacgagttctgcagatgcgagctgaagctgcagaagtggtacggggacctgcggggaaagcccttcgccatcgaagccgagaacagcatcctggacatcagcggcttcagcaagcagtacaactgtgccttcatctggcagaaggacggcgtgaagaagctgaacctgtacctgatcatcaactacttcaagggcggcaagctgcggttcaagaagatcaaacctgaagccttcgaagccaacagattctacaccgtgatcaacaaaaagagcggcgagatcgtgcccatggaggtgaacttcaacttcgacgaccccaacctgatcatcctgcctctggcctttggcaagagacagggcagagaattcatctggaacgacctgctgtccctggaaaccggcagcctgaagctggccaacggaagagtgatcgagaagacactgtacaacagaagaacccggcaggatgagcctgccctgttcgtggccctgaccttcgagcggcgggaggtcctggactcctccaatatcaaaccaatgaacctgatcggcgtggcaagaggcgaaaacatccccgccgtgatcgccctgaccgaccccgagggctgcccactgagccggtttaaggatagcctgggaaacccaacccacatcctgagaatcggcgagagctataaggagaagcagcggaccatccaggccaagaaggaggtggagcagcggagagccggcggctacagccggaagtacgccagcaaagccaagaatctggcagacgatatggtgagaaacaccgctagagatctgctgtactacgccgtgacccaggatgccatgctgatcttcgccaacctgagccggggcttcggccggcagggcaagcggaccttcatggccgagagacagtacacacggatggaggactggctgaccgccaagctggcctacgagggcctgagcaagacctacctgtccaagacactggcccagtacacctccaagacatgcagcaactgtgggtttaccatcaccagcgccgactacgacagggtgctggagaagctgaagaagacagcaacaggctggatgaccacaattaacggcaaggagctgaaggtggagggccagattacctactacaacagatacaagagacagaacgtagtcaaggacctgtccgtcgagctggatagactgagcgaagaatctgtgaacaacgacatctcctcctggacaaagggcagaagcggagaagctctgagcctcctgaagaaaagattctcccatagacccgtgcaggagaagttcgtgtgcctgaactgcggcttcgagacacacgcagccgagcaagccgccctgaacatcgccagatcctggctgttcctgcggagccaggagtacaagaaataccagacaaacaagacaaccggcaacaccgataagagagccttcgtcgagacctggcagtccttttaccggaagaagcttaaggaggtgtggaaacctgccgtgcggtctggcggatctggcggaggctccgtcgccttccgggacgtgatcgtggacttcacccaggaggaatggcagcagctgaagcctgctcaaaaggacctgtacagagatgtgatgatggaaatctactggaatctggtgtctctggacctggaaaccgagggagatatgaacgagcctgaccccgagaaagacagctgggaggatagaacaagcatcgtggttgtggaaggcctgatgcggaacggcgcccagggctacgcctgcgagaaggccggcatccagggctgtagagtgggcggcccaagcagcggcgcccctcctcccagcggcggcagcccagccggctccccaacctctaccgaggagggcacctctgagtccgccacccccgagagcggccctggcacctccaccgagcccagcgagggcagcgcacccggcagccctgccggcagccccacctccacagaggagggaaccagcaccgagcccagcgaaggcagcgccccaggcaccagcaccgagcctagtgagcaggagattaaacggatcaacaagatcagaagaagacttgtgaaagacagcaacaccaagaaggccggcaagacaggccccatgaaaaccctgctggttagagtgatgacacccgatctgagagagcggctggaaaacctgagaaagaagcctgaaaatatcccccagcccatcagcaatacatctagagccaacctgaataagctgctgaccgattacaccgaaatgaagaaggcgatcctgcatgtgtactgggaagagttccagaaggaccctgtgggcctgatgagccgggtggcccagcctgccagcaagaagatcgatcagaacaagctgaaacctgagatggacgagaagggcaacctgaccaccgccggctttgcctgctctcagtgtggccagcccctgttcgtgtacaagctggagcaggtgtctgagaagggcaaggcttacaccaactacttcggacggtgcaatgtggccgagcacgaaaagctgatcctgctggcccagctgaagcccgagaaggatagcgacgaagccgtgacatatagcctgggaaagtttgggcagagggccctggatttctacagcattcatgtgaccaaggagtccacccaccccgtgaagcccctggcccagatcgccggaaacagatacgcctccggacctgtgggaaaggccctgagcgacgcatgtatgggcacaatcgcctccttcctgtctaagtaccaggacatcatcatcgaacaccagaaggtggtgaagggcaaccagaagagactggagagcctgcgggagctggccggcaaggaaaacctggaataccctagcgtgaccctgccacctcagcctcacaccaaggagggcgttgatgcctacaacgaagtgatcgcccgggtgcgaatgtgggtgaacctgaacctgtggcagaagctgaagctaagcagagatgatgccaagcctctgctgagactgaagggattcccttcctttcctctggtcgagagacaggccaacgaagtggactggtgggacatggtgtgtaacgtgaagaagctgatcaacgagaaaaaggaggatggcaaggtgttttggcagaatctggctggctacaagagacaggaagccctgagaccatacctgagcagcgaggaagatcggaagaagggaaagaaattcgctcggtaccagctgggcgacctgctgctgcacctggaaaagaagcacggcgaggactggggaaaggtgtacgacgaggcctgggagcggattgacaagaaagtggaaggcctgagcaagcacatcaagctggaagaggaacggagaagcgaggacgcccagagcaaggccgccctgaccgactggctgcgggctaaggccagcttcgtgatcgagggcctgaaggaggccgacaaggacgagttctgcagatgcgagctgaagctgcagaagtggtacggggacctgcggggaaagcccttcgccatcgaagccgagaacagcatcctggacatcagcggcttcagcaagcagtacaactgtgccttcatctggcagaaggacggcgtgaagaagctgaacctgtacctgatcatcaactacttcaagggcggcaagctgcggttcaagaagatcaaacctgaagccttcgaagccaacagattctacaccgtgatcaacaaaaagagcggcgagatcgtgcccatggaggtgaacttcaacttcgacgaccccaacctgatcatcctgcctctggcctttggcaagagacagggcagagaattcatctggaacgacctgctgtccctggaaaccggcagcctgaagctggccaacggaagagtgatcgagaagacactgtacaacagaagaacccggcaggatgagcctgccctgttcgtggccctgaccttcgagcggcgggaggtcctggactcctccaatatcaaaccaatgaacctgatcggcgtggcaagaggcgaaaacatccccgccgtgatcgccctgaccgaccccgagggctgcccactgagccggtttaaggatagcctgggaaacccaacccacatcctgagaatcggcgagagctataaggagaagcagcggaccatccaggccaagaaggaggtggagcagcggagagccggcggctacagccggaagtacgccagcaaagccaagaatctggcagacgatatggtgagaaacaccgctagagatctgctgtactacgccgtgacccaggatgccatgctgatcttcgccaacctgagccggggcttcggccggcagggcaagcggaccttcatggccgagagacagtacacacggatggaggactggctgaccgccaagctggcctacgagggcctgagcaagacctacctgtccaagacactggcccagtacacctccaagacatgcagcaactgtgggtttaccatcaccagcgccgactacgacagggtgctggagaagctgaagaagacagcaacaggctggatgaccacaattaacggcaaggagctgaaggtggagggccagattacctactacaacagatacaagagacagaacgtagtcaaggacctgtccgtcgagctggatagactgagcgaagaatctgtgaacaacgacatctcctcctggacaaagggcagaagcggagaagctctgagcctcctgaagaaaagattctcccatagacccgtgcaggagaagttcgtgtgcctgaactgcggcttcgagacacacgcagccgagcaagccgccctgaacatcgccagatcctggctgttcctgcggagccaggagtacaagaaataccagacaaacaagacaaccggcaacaccgataagagagccttcgtcgagacctggcagtccttttaccggaagaagcttaaggaggtgtggaaacctgccgtgcggtctggcggatctggcggaggctcctgtgacctacaacgacgtgcacgtggacatcacccaggaggaatgggctctgatggaccccagccagcggaacctgtacaaggatgtgatggtcgagacatacatgaacctgaccgccatcggatataattgggagaacctggaagtggaagaaccatgtcagaaccccctgaagcacggcagacacgagagacctcatacaggcgagaaaccttacgagtacaatcagtgcggcaaggccttcgcccaacctggatctggctccggcagcggccccaagaaaaagagaaaagtctaagctgccttctgcggggcttgccttctggccatgcccttcttctctcccttgcacctgtacctcttggtctttgaataaagcctgagtaggaaggctagcaaaaaaaaaaaaaaaaaaaaaaaaaaaaaaaaaaaaaaaaaaaaaaaaaaaaaaaaaaaaaaaaaaaaaaaaaaaaaaaa

SEQ ID NO: 18519 - RNA, 9512 nt, synthetic construct
  source 1..9512: mol_type = other RNA
aggaaataagagagaaaagaagagtaagaagaaatataagagccaccatggcccctaagaagaagcgtaaagtgagccggatggaacgcctcgtctacgaggtgcggcagaagtgcagaaacatcgaggacatctgcatctcctgcggatctctgaacgtgaccctggagcacccactgttcatcggcggcatgtgccagaactgtaaaaactgttttctggagtgtgcctatcaatacgacgatgacggctaccagagctactgcaccatctgttgcggcggaagagaggtgctgatgtgtggaaataacaactgctgccggtgcttctgcgtggaatgcgtggacctgctggtgggccccggcgccgcccaggccgctattaaggaagatccttggaactgctacatgtgcggccacaagggcacatacggcctgctgagacggagagaggactggcctagcagactgcagatgttcttcgccaataaccacgaccaggagttcgacccccctaaggtgtaccctcccgtccccgccgagaagagaaagcccatccgggtcctgagcctgttcgatggcatcgccaccggtctgctggtgctgaaggacctgggcatccaggtggataggtacattgcctccgaggtgtgcgaggactccatcaccgtgggaatggtgcgtcatcagggcaagatcatgtacgtgggcgacgtgcggagcgtgacacagaagcatatccaggagtggggccctttcgacctggtgatcggcggcagcccttgcaatgacctgagcatcgtgaacccagcccggaagggcctgtacgagggaaccggcagactgttcttcgagttttacagactgctgcacgacgcccggcctaaggaaggcgacgaccggcccttcttttggctgttcgagaatgtggtggccatgggagtcagcgacaagcgggatattagccggttcctggagagcaaccccgtgatgatcgatgccaaggaagtgagcgccgcccaccgggccagatacttctggggcaatctgcctggcatgaacagacccctggccagcaccgtgaacgacaagctggagctgcaggagtgcctggagcacggccggatcgccaagttcagcaaggtgagaaccatcaccacccgaagcaacagcatcaaacaaggcaaggaccagcactttcctgtgttcatgaacgagaaggaggacatcctgtggtgtaccgagatggagagagtgttcgggttcccagtccactacacagatgtcagcaacatgtctagactggccagacagagactgctgggaagaagctggtccgtccctgtgatcagacacctgttcgcccctctgaaggagtacttcgcctgcgtgagcagcggcaacagcaacgccaacagccggggccccagcttctctagcggcctggtgccactgtccctgagagggagccacatgggccccatggagatctacaaaaccgtgagcgcctggaagcggcagcctgtgcgcgtgctgagcctgtttcggaatatcgataaagtcctgaaaagcctgggattcctggagagcggctctggctccggcggtggcaccctgaagtacgtggaggatgtgacaaacgtggtcagacgggatgtggagaagtggggccccttcgatctggtgtacggcagcacccaacccctgggcagctcttgtgaccggtgccctggctggtacatgtttcagttccaccggatcctgcagtacgccctgccgagacaggagtcccagcggccattcttttggattttcatggacaacttgctgctgaccgaggatgaccaggaaactaccactcggttcctgcagaccgaagccgtgaccctgcaggacgtgagaggccgggactaccagaacgccatgcgggtgtggtccaacatccctggactgaaaagcaagcacgcacctctgacccctaaagaagaggagtacctgcaggcccaggtgcggagcagaagcaagctggacgcccctaaggtggatctgctggtgaagaattgcctcctgcccctgagagagtacttcaagtatttcagccagaatagtctgcccctgggaggcagcggcggcggcgccctggtgacatttgaggacgtcgccgtgcggttcacccaggaggaatgggctctgctggatccttctcagaaaatcctgtaccgggacgtgatgagagagacataccggaatctgacctccgtgggcatcaactgggaatgttgggaccttgaagcctgcttcagaagcctgggaagaaacctgagagtgcaggtggtgaagagaaagtgcgagctgaccaacagcggcccctgcgccgagggcggcccaagcagcggcgcccctcctcccagcggcggcagcccagccggctccccaacctctaccgaggagggcacctctgagtccgccacccccgagagcggccctggcacctccaccgagcccagcgagggcagcgcacccggcagccctgccggcagccccacctccacagaggagggaaccagcaccgagcccagcgaaggcagcgccccaggcaccagcaccgagcctagtgagcaggagattaaacggatcaacaagatcagaagaagacttgtgaaagacagcaacaccaagaaggccggcaagacaggccccatgaaaaccctgctggttagagtgatgacacccgatctgagagagcggctggaaaacctgagaaagaagcctgaaaatatcccccagcccatcagcaatacatctagagccaacctgaataagctgctgaccgattacaccgaaatgaagaaggcgatcctgcatgtgtactgggaagagttccagaaggaccctgtgggcctgatgagccgggtggcccagcctgccagcaagaagatcgatcagaacaagctgaaacctgagatggacgagaagggcaacctgaccaccgccggctttgcctgctctcagtgtggccagcccctgttcgtgtacaagctggagcaggtgtctgagaagggcaaggcttacaccaactacttcggacggtgcaatgtggccgagcacgaaaagctgatcctgctggcccagctgaagcccgagaaggatagcgacgaagccgtgacatatagcctgggaaagtttgggcagagggccctggatttctacagcattcatgtgaccaaggagtccacccaccccgtgaagcccctggcccagatcgccggaaacagatacgcctccggacctgtgggaaaggccctgagcgacgcatgtatgggcacaatcgcctccttcctgtctaagtaccaggacatcatcatcgaacaccagaaggtggtgaagggcaaccagaagagactggagagcctgcgggagctggccggcaaggaaaacctggaataccctagcgtgaccctgccacctcagcctcacaccaaggagggcgttgatgcctacaacgaagtgatcgcccgggtgcgaatgtgggtgaacctgaacctgtggcagaagctgaagctaagcagagatgatgccaagcctctgctgagactgaagggattcccttcctttcctctggtcgagagacaggccaacgaagtggactggtgggacatggtgtgtaacgtgaagaagctgatcaacgagaaaaaggaggatggcaaggtgttttggcagaatctggctggctacaagagacaggaagccctgagaccatacctgagcagcgaggaagatcggaagaagggaaagaaattcgctcggtaccagctgggcgacctgctgctgcacctggaaaagaagcacggcgaggactggggaaaggtgtacgacgaggcctgggagcggattgacaagaaagtggaaggcctgagcaagcacatcaagctggaagaggaacggagaagcgaggacgcccagagcaaggccgccctgaccgactggctgcgggctaaggccagcttcgtgatcgagggcctgaaggaggccgacaaggacgagttctgcagatgcgagctgaagctgcagaagtggtacggggacctgcggggaaagcccttcgccatcgaagccgagaacagcatcctggacatcagcggcttcagcaagcagtacaactgtgccttcatctggcagaaggacggcgtgaagaagctgaacctgtacctgatcatcaactacttcaagggcggcaagctgcggttcaagaagatcaaacctgaagccttcgaagccaacagattctacaccgtgatcaacaaaaagagcggcgagatcgtgcccatggaggtgaacttcaacttcgacgaccccaacctgatcatcctgcctctggcctttggcaagagacagggcagagaattcatctggaacgacctgctgtccctggaaaccggcagcctgaagctggccaacggaagagtgatcgagaagacactgtacaacagaagaacccggcaggatgagcctgccctgttcgtggccctgaccttcgagcggcgggaggtcctggactcctccaatatcaaaccaatgaacctgatcggcgtggcaagaggcgaaaacatccccgccgtgatcgccctgaccgaccccgagggctgcccactgagccggtttaaggatagcctgggaaacccaacccacatcctgagaatcggcgagagctataaggagaagcagcggaccatccaggccaagaaggaggtggagcagcggagagccggcggctacagccggaagtacgccagcaaagccaagaatctggcagacgatatggtgagaaacaccgctagagatctgctgtactacgccgtgacccaggatgccatgctgatcttcgccaacctgagccggggcttcggccggcagggcaagcggaccttcatggccgagagacagtacacacggatggaggactggctgaccgccaagctggcctacgagggcctgagcaagacctacctgtccaagacactggcccagtacacctccaagacatgcagcaactgtgggtttaccatcaccagcgccgactacgacagggtgctggagaagctgaagaagacagcaacaggctggatgaccacaattaacggcaaggagctgaaggtggagggccagattacctactacaacagatacaagagacagaacgtagtcaaggacctgtccgtcgagctggatagactgagcgaagaatctgtgaacaacgacatctcctcctggacaaagggcagaagcggagaagctctgagcctcctgaagaaaagattctcccatagacccgtgcaggagaagttcgtgtgcctgaactgcggcttcgagacacacgcagccgagcaagccgccctgaacatcgccagatcctggctgttcctgcggagccaggagtacaagaaataccagacaaacaagacaaccggcaacaccgataagagagccttcgtcgagacctggcagtccttttaccggaagaagcttaaggaggtgtggaaacctgccgtgcggtctggcggatctggcggaggctccgtcgccttccgggacgtgatcgtggacttcacccaggaggaatggcagcagctgaagcctgctcaaaaggacctgtacagagatgtgatgatggaaatctactggaatctggtgtctctggacctggaaaccgagggagatatgaacgagcctgaccccgagaaagacagctgggaggatagaacaagcatcgtggttgtggaaggcctgatgcggaacggcgcccagggctacgcctgcgagaaggccggcatccagggctgtagagtgggcggcccaagcagcggcgcccctcctcccagcggcggcagcccagccggctccccaacctctaccgaggagggcacctctgagtccgccacccccgagagcggccctggcacctccaccgagcccagcgagggcagcgcacccggcagccctgccggcagccccacctccacagaggagggaaccagcaccgagcccagcgaaggcagcgccccaggcaccagcaccgagcctagtgagcaggagattaaacggatcaacaagatcagaagaagacttgtgaaagacagcaacaccaagaaggccggcaagacaggccccatgaaaaccctgctggttagagtgatgacacccgatctgagagagcggctggaaaacctgagaaagaagcctgaaaatatcccccagcccatcagcaatacatctagagccaacctgaataagctgctgaccgattacaccgaaatgaagaaggcgatcctgcatgtgtactgggaagagttccagaaggaccctgtgggcctgatgagccgggtggcccagcctgccagcaagaagatcgatcagaacaagctgaaacctgagatggacgagaagggcaacctgaccaccgccggctttgcctgctctcagtgtggccagcccctgttcgtgtacaagctggagcaggtgtctgagaagggcaaggcttacaccaactacttcggacggtgcaatgtggccgagcacgaaaagctgatcctgctggcccagctgaagcccgagaaggatagcgacgaagccgtgacatatagcctgggaaagtttgggcagagggccctggatttctacagcattcatgtgaccaaggagtccacccaccccgtgaagcccctggcccagatcgccggaaacagatacgcctccggacctgtgggaaaggccctgagcgacgcatgtatgggcacaatcgcctccttcctgtctaagtaccaggacatcatcatcgaacaccagaaggtggtgaagggcaaccagaagagactggagagcctgcgggagctggccggcaaggaaaacctggaataccctagcgtgaccctgccacctcagcctcacaccaaggagggcgttgatgcctacaacgaagtgatcgcccgggtgcgaatgtgggtgaacctgaacctgtggcagaagctgaagctaagcagagatgatgccaagcctctgctgagactgaagggattcccttcctttcctctggtcgagagacaggccaacgaagtggactggtgggacatggtgtgtaacgtgaagaagctgatcaacgagaaaaaggaggatggcaaggtgttttggcagaatctggctggctacaagagacaggaagccctgagaccatacctgagcagcgaggaagatcggaagaagggaaagaaattcgctcggtaccagctgggcgacctgctgctgcacctggaaaagaagcacggcgaggactggggaaaggtgtacgacgaggcctgggagcggattgacaagaaagtggaaggcctgagcaagcacatcaagctggaagaggaacggagaagcgaggacgcccagagcaaggccgccctgaccgactggctgcgggctaaggccagcttcgtgatcgagggcctgaaggaggccgacaaggacgagttctgcagatgcgagctgaagctgcagaagtggtacggggacctgcggggaaagcccttcgccatcgaagccgagaacagcatcctggacatcagcggcttcagcaagcagtacaactgtgccttcatctggcagaaggacggcgtgaagaagctgaacctgtacctgatcatcaactacttcaagggcggcaagctgcggttcaagaagatcaaacctgaagccttcgaagccaacagattctacaccgtgatcaacaaaaagagcggcgagatcgtgcccatggaggtgaacttcaacttcgacgaccccaacctgatcatcctgcctctggcctttggcaagagacagggcagagaattcatctggaacgacctgctgtccctggaaaccggcagcctgaagctggccaacggaagagtgatcgagaagacactgtacaacagaagaacccggcaggatgagcctgccctgttcgtggccctgaccttcgagcggcgggaggtcctggactcctccaatatcaaaccaatgaacctgatcggcgtggcaagaggcgaaaacatccccgccgtgatcgccctgaccgaccccgagggctgcccactgagccggtttaaggatagcctgggaaacccaacccacatcctgagaatcggcgagagctataaggagaagcagcggaccatccaggccaagaaggaggtggagcagcggagagccggcggctacagccggaagtacgccagcaaagccaagaatctggcagacgatatggtgagaaacaccgctagagatctgctgtactacgccgtgacccaggatgccatgctgatcttcgccaacctgagccggggcttcggccggcagggcaagcggaccttcatggccgagagacagtacacacggatggaggactggctgaccgccaagctggcctacgagggcctgagcaagacctacctgtccaagacactggcccagtacacctccaagacatgcagcaactgtgggtttaccatcaccagcgccgactacgacagggtgctggagaagctgaagaagacagcaacaggctggatgaccacaattaacggcaaggagctgaaggtggagggccagattacctactacaacagatacaagagacagaacgtagtcaaggacctgtccgtcgagctggatagactgagcgaagaatctgtgaacaacgacatctcctcctggacaaagggcagaagcggagaagctctgagcctcctgaagaaaagattctcccatagacccgtgcaggagaagttcgtgtgcctgaactgcggcttcgagacacacgcagccgagcaagccgccctgaacatcgccagatcctggctgttcctgcggagccaggagtacaagaaataccagacaaacaagacaaccggcaacaccgataagagagccttcgtcgagacctggcagtccttttaccggaagaagcttaaggaggtgtggaaacctgccgtgcggtctggcggatctggcggaggctccttctcaggagagcgtggccttcgaggacgtggccgtctacttcaccaccaaagagtgggccatcatggtgcccgccgagagagccctgtacagagatgtgatgctggaaaactacgaggccgtggcttttgtggccgtgcctcctacaagcaagcccgctctggtgtcccacctggaacagggcaaggaaagctgcttcatccggcctccaggcgtgctgagcagaagcgactggcgggccggaggatctggctccggcagcggccccaagaaaaagagaaaagtctaagctgccttctgcggggcttgccttctggccatgcccttcttctctcccttgcacctgtacctcttggtctttgaataaagcctgagtaggaaggctagcaaaaaaaaaaaaaaaaaaaaaaaaaaaaaaaaaaaaaaaaaaaaaaaaaaaaaaaaaaaaaaaaaaaaaaaaaaaaaaaa

SEQ ID NO: 18520 - RNA, 9512 nt, synthetic construct
  source 1..9512: mol_type = other RNA
aggaaataagagagaaaagaagagtaagaagaaatataagagccaccatggcccctaagaagaagcgtaaagtgagccggatggaacgcctcgtctacgaggtgcggcagaagtgcagaaacatcgaggacatctgcatctcctgcggatctctgaacgtgaccctggagcacccactgttcatcggcggcatgtgccagaactgtaaaaactgttttctggagtgtgcctatcaatacgacgatgacggctaccagagctactgcaccatctgttgcggcggaagagaggtgctgatgtgtggaaataacaactgctgccggtgcttctgcgtggaatgcgtggacctgctggtgggccccggcgccgcccaggccgctattaaggaagatccttggaactgctacatgtgcggccacaagggcacatacggcctgctgagacggagagaggactggcctagcagactgcagatgttcttcgccaataaccacgaccaggagttcgacccccctaaggtgtaccctcccgtccccgccgagaagagaaagcccatccgggtcctgagcctgttcgatggcatcgccaccggtctgctggtgctgaaggacctgggcatccaggtggataggtacattgcctccgaggtgtgcgaggactccatcaccgtgggaatggtgcgtcatcagggcaagatcatgtacgtgggcgacgtgcggagcgtgacacagaagcatatccaggagtggggccctttcgacctggtgatcggcggcagcccttgcaatgacctgagcatcgtgaacccagcccggaagggcctgtacgagggaaccggcagactgttcttcgagttttacagactgctgcacgacgcccggcctaaggaaggcgacgaccggcccttcttttggctgttcgagaatgtggtggccatgggagtcagcgacaagcgggatattagccggttcctggagagcaaccccgtgatgatcgatgccaaggaagtgagcgccgcccaccgggccagatacttctggggcaatctgcctggcatgaacagacccctggccagcaccgtgaacgacaagctggagctgcaggagtgcctggagcacggccggatcgccaagttcagcaaggtgagaaccatcaccacccgaagcaacagcatcaaacaaggcaaggaccagcactttcctgtgttcatgaacgagaaggaggacatcctgtggtgtaccgagatggagagagtgttcgggttcccagtccactacacagatgtcagcaacatgtctagactggccagacagagactgctgggaagaagctggtccgtccctgtgatcagacacctgttcgcccctctgaaggagtacttcgcctgcgtgagcagcggcaacagcaacgccaacagccggggccccagcttctctagcggcctggtgccactgtccctgagagggagccacatgggccccatggagatctacaaaaccgtgagcgcctggaagcggcagcctgtgcgcgtgctgagcctgtttcggaatatcgataaagtcctgaaaagcctgggattcctggagagcggctctggctccggcggtggcaccctgaagtacgtggaggatgtgacaaacgtggtcagacgggatgtggagaagtggggccccttcgatctggtgtacggcagcacccaacccctgggcagctcttgtgaccggtgccctggctggtacatgtttcagttccaccggatcctgcagtacgccctgccgagacaggagtcccagcggccattcttttggattttcatggacaacttgctgctgaccgaggatgaccaggaaactaccactcggttcctgcagaccgaagccgtgaccctgcaggacgtgagaggccgggactaccagaacgccatgcgggtgtggtccaacatccctggactgaaaagcaagcacgcacctctgacccctaaagaagaggagtacctgcaggcccaggtgcggagcagaagcaagctggacgcccctaaggtggatctgctggtgaagaattgcctcctgcccctgagagagtacttcaagtatttcagccagaatagtctgcccctgggaggcagcggcggcggcgccctggtgacatttgaggacgtcgccgtgcggttcacccaggaggaatgggctctgctggatccttctcagaaaatcctgtaccgggacgtgatgagagagacataccggaatctgacctccgtgggcatcaactgggaatgttgggaccttgaagcctgcttcagaagcctgggaagaaacctgagagtgcaggtggtgaagagaaagtgcgagctgaccaacagcggcccctgcgccgagggcggcccaagcagcggcgcccctcctcccagcggcggcagcccagccggctccccaacctctaccgaggagggcacctctgagtccgccacccccgagagcggccctggcacctccaccgagcccagcgagggcagcgcacccggcagccctgccggcagccccacctccacagaggagggaaccagcaccgagcccagcgaaggcagcgccccaggcaccagcaccgagcctagtgagcaggagattaaacggatcaacaagatcagaagaagacttgtgaaagacagcaacaccaagaaggccggcaagacaggccccatgaaaaccctgctggttagagtgatgacacccgatctgagagagcggctggaaaacctgagaaagaagcctgaaaatatcccccagcccatcagcaatacatctagagccaacctgaataagctgctgaccgattacaccgaaatgaagaaggcgatcctgcatgtgtactgggaagagttccagaaggaccctgtgggcctgatgagccgggtggcccagcctgccagcaagaagatcgatcagaacaagctgaaacctgagatggacgagaagggcaacctgaccaccgccggctttgcctgctctcagtgtggccagcccctgttcgtgtacaagctggagcaggtgtctgagaagggcaaggcttacaccaactacttcggacggtgcaatgtggccgagcacgaaaagctgatcctgctggcccagctgaagcccgagaaggatagcgacgaagccgtgacatatagcctgggaaagtttgggcagagggccctggatttctacagcattcatgtgaccaaggagtccacccaccccgtgaagcccctggcccagatcgccggaaacagatacgcctccggacctgtgggaaaggccctgagcgacgcatgtatgggcacaatcgcctccttcctgtctaagtaccaggacatcatcatcgaacaccagaaggtggtgaagggcaaccagaagagactggagagcctgcgggagctggccggcaaggaaaacctggaataccctagcgtgaccctgccacctcagcctcacaccaaggagggcgttgatgcctacaacgaagtgatcgcccgggtgcgaatgtgggtgaacctgaacctgtggcagaagctgaagctaagcagagatgatgccaagcctctgctgagactgaagggattcccttcctttcctctggtcgagagacaggccaacgaagtggactggtgggacatggtgtgtaacgtgaagaagctgatcaacgagaaaaaggaggatggcaaggtgttttggcagaatctggctggctacaagagacaggaagccctgagaccatacctgagcagcgaggaagatcggaagaagggaaagaaattcgctcggtaccagctgggcgacctgctgctgcacctggaaaagaagcacggcgaggactggggaaaggtgtacgacgaggcctgggagcggattgacaagaaagtggaaggcctgagcaagcacatcaagctggaagaggaacggagaagcgaggacgcccagagcaaggccgccctgaccgactggctgcgggctaaggccagcttcgtgatcgagggcctgaaggaggccgacaaggacgagttctgcagatgcgagctgaagctgcagaagtggtacggggacctgcggggaaagcccttcgccatcgaagccgagaacagcatcctggacatcagcggcttcagcaagcagtacaactgtgccttcatctggcagaaggacggcgtgaagaagctgaacctgtacctgatcatcaactacttcaagggcggcaagctgcggttcaagaagatcaaacctgaagccttcgaagccaacagattctacaccgtgatcaacaaaaagagcggcgagatcgtgcccatggaggtgaacttcaacttcgacgaccccaacctgatcatcctgcctctggcctttggcaagagacagggcagagaattcatctggaacgacctgctgtccctggaaaccggcagcctgaagctggccaacggaagagtgatcgagaagacactgtacaacagaagaacccggcaggatgagcctgccctgttcgtggccctgaccttcgagcggcgggaggtcctggactcctccaatatcaaaccaatgaacctgatcggcgtggcaagaggcgaaaacatccccgccgtgatcgccctgaccgaccccgagggctgcccactgagccggtttaaggatagcctgggaaacccaacccacatcctgagaatcggcgagagctataaggagaagcagcggaccatccaggccaagaaggaggtggagcagcggagagccggcggctacagccggaagtacgccagcaaagccaagaatctggcagacgatatggtgagaaacaccgctagagatctgctgtactacgccgtgacccaggatgccatgctgatcttcgccaacctgagccggggcttcggccggcagggcaagcggaccttcatggccgagagacagtacacacggatggaggactggctgaccgccaagctggcctacgagggcctgagcaagacctacctgtccaagacactggcccagtacacctccaagacatgcagcaactgtgggtttaccatcaccagcgccgactacgacagggtgctggagaagctgaagaagacagcaacaggctggatgaccacaattaacggcaaggagctgaaggtggagggccagattacctactacaacagatacaagagacagaacgtagtcaaggacctgtccgtcgagctggatagactgagcgaagaatctgtgaacaacgacatctcctcctggacaaagggcagaagcggagaagctctgagcctcctgaagaaaagattctcccatagacccgtgcaggagaagttcgtgtgcctgaactgcggcttcgagacacacgcagccgagcaagccgccctgaacatcgccagatcctggctgttcctgcggagccaggagtacaagaaataccagacaaacaagacaaccggcaacaccgataagagagccttcgtcgagacctggcagtccttttaccggaagaagcttaaggaggtgtggaaacctgccgtgcggtctggcggatctggcggaggctccgtcgccttccgggacgtgatcgtggacttcacccaggaggaatggcagcagctgaagcctgctcaaaaggacctgtacagagatgtgatgatggaaatctactggaatctggtgtctctggacctggaaaccgagggagatatgaacgagcctgaccccgagaaagacagctgggaggatagaacaagcatcgtggttgtggaaggcctgatgcggaacggcgcccagggctacgcctgcgagaaggccggcatccagggctgtagagtgggcggcccaagcagcggcgcccctcctcccagcggcggcagcccagccggctccccaacctctaccgaggagggcacctctgagtccgccacccccgagagcggccctggcacctccaccgagcccagcgagggcagcgcacccggcagccctgccggcagccccacctccacagaggagggaaccagcaccgagcccagcgaaggcagcgccccaggcaccagcaccgagcctagtgagcaggagattaaacggatcaacaagatcagaagaagacttgtgaaagacagcaacaccaagaaggccggcaagacaggccccatgaaaaccctgctggttagagtgatgacacccgatctgagagagcggctggaaaacctgagaaagaagcctgaaaatatcccccagcccatcagcaatacatctagagccaacctgaataagctgctgaccgattacaccgaaatgaagaaggcgatcctgcatgtgtactgggaagagttccagaaggaccctgtgggcctgatgagccgggtggcccagcctgccagcaagaagatcgatcagaacaagctgaaacctgagatggacgagaagggcaacctgaccaccgccggctttgcctgctctcagtgtggccagcccctgttcgtgtacaagctggagcaggtgtctgagaagggcaaggcttacaccaactacttcggacggtgcaatgtggccgagcacgaaaagctgatcctgctggcccagctgaagcccgagaaggatagcgacgaagccgtgacatatagcctgggaaagtttgggcagagggccctggatttctacagcattcatgtgaccaaggagtccacccaccccgtgaagcccctggcccagatcgccggaaacagatacgcctccggacctgtgggaaaggccctgagcgacgcatgtatgggcacaatcgcctccttcctgtctaagtaccaggacatcatcatcgaacaccagaaggtggtgaagggcaaccagaagagactggagagcctgcgggagctggccggcaaggaaaacctggaataccctagcgtgaccctgccacctcagcctcacaccaaggagggcgttgatgcctacaacgaagtgatcgcccgggtgcgaatgtgggtgaacctgaacctgtggcagaagctgaagctaagcagagatgatgccaagcctctgctgagactgaagggattcccttcctttcctctggtcgagagacaggccaacgaagtggactggtgggacatggtgtgtaacgtgaagaagctgatcaacgagaaaaaggaggatggcaaggtgttttggcagaatctggctggctacaagagacaggaagccctgagaccatacctgagcagcgaggaagatcggaagaagggaaagaaattcgctcggtaccagctgggcgacctgctgctgcacctggaaaagaagcacggcgaggactggggaaaggtgtacgacgaggcctgggagcggattgacaagaaagtggaaggcctgagcaagcacatcaagctggaagaggaacggagaagcgaggacgcccagagcaaggccgccctgaccgactggctgcgggctaaggccagcttcgtgatcgagggcctgaaggaggccgacaaggacgagttctgcagatgcgagctgaagctgcagaagtggtacggggacctgcggggaaagcccttcgccatcgaagccgagaacagcatcctggacatcagcggcttcagcaagcagtacaactgtgccttcatctggcagaaggacggcgtgaagaagctgaacctgtacctgatcatcaactacttcaagggcggcaagctgcggttcaagaagatcaaacctgaagccttcgaagccaacagattctacaccgtgatcaacaaaaagagcggcgagatcgtgcccatggaggtgaacttcaacttcgacgaccccaacctgatcatcctgcctctggcctttggcaagagacagggcagagaattcatctggaacgacctgctgtccctggaaaccggcagcctgaagctggccaacggaagagtgatcgagaagacactgtacaacagaagaacccggcaggatgagcctgccctgttcgtggccctgaccttcgagcggcgggaggtcctggactcctccaatatcaaaccaatgaacctgatcggcgtggcaagaggcgaaaacatccccgccgtgatcgccctgaccgaccccgagggctgcccactgagccggtttaaggatagcctgggaaacccaacccacatcctgagaatcggcgagagctataaggagaagcagcggaccatccaggccaagaaggaggtggagcagcggagagccggcggctacagccggaagtacgccagcaaagccaagaatctggcagacgatatggtgagaaacaccgctagagatctgctgtactacgccgtgacccaggatgccatgctgatcttcgccaacctgagccggggcttcggccggcagggcaagcggaccttcatggccgagagacagtacacacggatggaggactggctgaccgccaagctggcctacgagggcctgagcaagacctacctgtccaagacactggcccagtacacctccaagacatgcagcaactgtgggtttaccatcaccagcgccgactacgacagggtgctggagaagctgaagaagacagcaacaggctggatgaccacaattaacggcaaggagctgaaggtggagggccagattacctactacaacagatacaagagacagaacgtagtcaaggacctgtccgtcgagctggatagactgagcgaagaatctgtgaacaacgacatctcctcctggacaaagggcagaagcggagaagctctgagcctcctgaagaaaagattctcccatagacccgtgcaggagaagttcgtgtgcctgaactgcggcttcgagacacacgcagccgagcaagccgccctgaacatcgccagatcctggctgttcctgcggagccaggagtacaagaaataccagacaaacaagacaaccggcaacaccgataagagagccttcgtcgagacctggcagtccttttaccggaagaagcttaaggaggtgtggaaacctgccgtgcggtctggcggatctggcggaggctccttctaaagcccctatcacattcggcgacctggccatctacttcagccaggaggaatgggagtggctgagccccatccagaaggacctgtacgaggacgtgatgctggaaaactacagaaatctggtgtccctgggcctcagctttagacgccccaacgtgatcaccctgctggaaaagggcaaggccccatggatggtcgagcctgctagacggcggagaggacctgatagcggcagcaaggtgggatctggctccggcagcggccccaagaaaaagagaaaagtctaagctgccttctgcggggcttgccttctggccatgcccttcttctctcccttgcacctgtacctcttggtctttgaataaagcctgagtaggaaggctagcaaaaaaaaaaaaaaaaaaaaaaaaaaaaaaaaaaaaaaaaaaaaaaaaaaaaaaaaaaaaaaaaaaaaaaaaaaaaaaaa

SEQ ID NO: 18521 - RNA, 9512 nt, synthetic construct
  source 1..9512: mol_type = other RNA
aggaaataagagagaaaagaagagtaagaagaaatataagagccaccatggcccctaagaagaagcgtaaagtgagccggatggaacgcctcgtctacgaggtgcggcagaagtgcagaaacatcgaggacatctgcatctcctgcggatctctgaacgtgaccctggagcacccactgttcatcggcggcatgtgccagaactgtaaaaactgttttctggagtgtgcctatcaatacgacgatgacggctaccagagctactgcaccatctgttgcggcggaagagaggtgctgatgtgtggaaataacaactgctgccggtgcttctgcgtggaatgcgtggacctgctggtgggccccggcgccgcccaggccgctattaaggaagatccttggaactgctacatgtgcggccacaagggcacatacggcctgctgagacggagagaggactggcctagcagactgcagatgttcttcgccaataaccacgaccaggagttcgacccccctaaggtgtaccctcccgtccccgccgagaagagaaagcccatccgggtcctgagcctgttcgatggcatcgccaccggtctgctggtgctgaaggacctgggcatccaggtggataggtacattgcctccgaggtgtgcgaggactccatcaccgtgggaatggtgcgtcatcagggcaagatcatgtacgtgggcgacgtgcggagcgtgacacagaagcatatccaggagtggggccctttcgacctggtgatcggcggcagcccttgcaatgacctgagcatcgtgaacccagcccggaagggcctgtacgagggaaccggcagactgttcttcgagttttacagactgctgcacgacgcccggcctaaggaaggcgacgaccggcccttcttttggctgttcgagaatgtggtggccatgggagtcagcgacaagcgggatattagccggttcctggagagcaaccccgtgatgatcgatgccaaggaagtgagcgccgcccaccgggccagatacttctggggcaatctgcctggcatgaacagacccctggccagcaccgtgaacgacaagctggagctgcaggagtgcctggagcacggccggatcgccaagttcagcaaggtgagaaccatcaccacccgaagcaacagcatcaaacaaggcaaggaccagcactttcctgtgttcatgaacgagaaggaggacatcctgtggtgtaccgagatggagagagtgttcgggttcccagtccactacacagatgtcagcaacatgtctagactggccagacagagactgctgggaagaagctggtccgtccctgtgatcagacacctgttcgcccctctgaaggagtacttcgcctgcgtgagcagcggcaacagcaacgccaacagccggggccccagcttctctagcggcctggtgccactgtccctgagagggagccacatgggccccatggagatctacaaaaccgtgagcgcctggaagcggcagcctgtgcgcgtgctgagcctgtttcggaatatcgataaagtcctgaaaagcctgggattcctggagagcggctctggctccggcggtggcaccctgaagtacgtggaggatgtgacaaacgtggtcagacgggatgtggagaagtggggccccttcgatctggtgtacggcagcacccaacccctgggcagctcttgtgaccggtgccctggctggtacatgtttcagttccaccggatcctgcagtacgccctgccgagacaggagtcccagcggccattcttttggattttcatggacaacttgctgctgaccgaggatgaccaggaaactaccactcggttcctgcagaccgaagccgtgaccctgcaggacgtgagaggccgggactaccagaacgccatgcgggtgtggtccaacatccctggactgaaaagcaagcacgcacctctgacccctaaagaagaggagtacctgcaggcccaggtgcggagcagaagcaagctggacgcccctaaggtggatctgctggtgaagaattgcctcctgcccctgagagagtacttcaagtatttcagccagaatagtctgcccctgggaggcagcggcggcggcgccctggtgacatttgaggacgtcgccgtgcggttcacccaggaggaatgggctctgctggatccttctcagaaaatcctgtaccgggacgtgatgagagagacataccggaatctgacctccgtgggcatcaactgggaatgttgggaccttgaagcctgcttcagaagcctgggaagaaacctgagagtgcaggtggtgaagagaaagtgcgagctgaccaacagcggcccctgcgccgagggcggcccaagcagcggcgcccctcctcccagcggcggcagcccagccggctccccaacctctaccgaggagggcacctctgagtccgccacccccgagagcggccctggcacctccaccgagcccagcgagggcagcgcacccggcagccctgccggcagccccacctccacagaggagggaaccagcaccgagcccagcgaaggcagcgccccaggcaccagcaccgagcctagtgagcaggagattaaacggatcaacaagatcagaagaagacttgtgaaagacagcaacaccaagaaggccggcaagacaggccccatgaaaaccctgctggttagagtgatgacacccgatctgagagagcggctggaaaacctgagaaagaagcctgaaaatatcccccagcccatcagcaatacatctagagccaacctgaataagctgctgaccgattacaccgaaatgaagaaggcgatcctgcatgtgtactgggaagagttccagaaggaccctgtgggcctgatgagccgggtggcccagcctgccagcaagaagatcgatcagaacaagctgaaacctgagatggacgagaagggcaacctgaccaccgccggctttgcctgctctcagtgtggccagcccctgttcgtgtacaagctggagcaggtgtctgagaagggcaaggcttacaccaactacttcggacggtgcaatgtggccgagcacgaaaagctgatcctgctggcccagctgaagcccgagaaggatagcgacgaagccgtgacatatagcctgggaaagtttgggcagagggccctggatttctacagcattcatgtgaccaaggagtccacccaccccgtgaagcccctggcccagatcgccggaaacagatacgcctccggacctgtgggaaaggccctgagcgacgcatgtatgggcacaatcgcctccttcctgtctaagtaccaggacatcatcatcgaacaccagaaggtggtgaagggcaaccagaagagactggagagcctgcgggagctggccggcaaggaaaacctggaataccctagcgtgaccctgccacctcagcctcacaccaaggagggcgttgatgcctacaacgaagtgatcgcccgggtgcgaatgtgggtgaacctgaacctgtggcagaagctgaagctaagcagagatgatgccaagcctctgctgagactgaagggattcccttcctttcctctggtcgagagacaggccaacgaagtggactggtgggacatggtgtgtaacgtgaagaagctgatcaacgagaaaaaggaggatggcaaggtgttttggcagaatctggctggctacaagagacaggaagccctgagaccatacctgagcagcgaggaagatcggaagaagggaaagaaattcgctcggtaccagctgggcgacctgctgctgcacctggaaaagaagcacggcgaggactggggaaaggtgtacgacgaggcctgggagcggattgacaagaaagtggaaggcctgagcaagcacatcaagctggaagaggaacggagaagcgaggacgcccagagcaaggccgccctgaccgactggctgcgggctaaggccagcttcgtgatcgagggcctgaaggaggccgacaaggacgagttctgcagatgcgagctgaagctgcagaagtggtacggggacctgcggggaaagcccttcgccatcgaagccgagaacagcatcctggacatcagcggcttcagcaagcagtacaactgtgccttcatctggcagaaggacggcgtgaagaagctgaacctgtacctgatcatcaactacttcaagggcggcaagctgcggttcaagaagatcaaacctgaagccttcgaagccaacagattctacaccgtgatcaacaaaaagagcggcgagatcgtgcccatggaggtgaacttcaacttcgacgaccccaacctgatcatcctgcctctggcctttggcaagagacagggcagagaattcatctggaacgacctgctgtccctggaaaccggcagcctgaagctggccaacggaagagtgatcgagaagacactgtacaacagaagaacccggcaggatgagcctgccctgttcgtggccctgaccttcgagcggcgggaggtcctggactcctccaatatcaaaccaatgaacctgatcggcgtggcaagaggcgaaaacatccccgccgtgatcgccctgaccgaccccgagggctgcccactgagccggtttaaggatagcctgggaaacccaacccacatcctgagaatcggcgagagctataaggagaagcagcggaccatccaggccaagaaggaggtggagcagcggagagccggcggctacagccggaagtacgccagcaaagccaagaatctggcagacgatatggtgagaaacaccgctagagatctgctgtactacgccgtgacccaggatgccatgctgatcttcgccaacctgagccggggcttcggccggcagggcaagcggaccttcatggccgagagacagtacacacggatggaggactggctgaccgccaagctggcctacgagggcctgagcaagacctacctgtccaagacactggcccagtacacctccaagacatgcagcaactgtgggtttaccatcaccagcgccgactacgacagggtgctggagaagctgaagaagacagcaacaggctggatgaccacaattaacggcaaggagctgaaggtggagggccagattacctactacaacagatacaagagacagaacgtagtcaaggacctgtccgtcgagctggatagactgagcgaagaatctgtgaacaacgacatctcctcctggacaaagggcagaagcggagaagctctgagcctcctgaagaaaagattctcccatagacccgtgcaggagaagttcgtgtgcctgaactgcggcttcgagacacacgcagccgagcaagccgccctgaacatcgccagatcctggctgttcctgcggagccaggagtacaagaaataccagacaaacaagacaaccggcaacaccgataagagagccttcgtcgagacctggcagtccttttaccggaagaagcttaaggaggtgtggaaacctgccgtgcggtctggcggatctggcggaggctccgtcgccttccgggacgtgatcgtggacttcacccaggaggaatggcagcagctgaagcctgctcaaaaggacctgtacagagatgtgatgatggaaatctactggaatctggtgtctctggacctggaaaccgagggagatatgaacgagcctgaccccgagaaagacagctgggaggatagaacaagcatcgtggttgtggaaggcctgatgcggaacggcgcccagggctacgcctgcgagaaggccggcatccagggctgtagagtgggcggcccaagcagcggcgcccctcctcccagcggcggcagcccagccggctccccaacctctaccgaggagggcacctctgagtccgccacccccgagagcggccctggcacctccaccgagcccagcgagggcagcgcacccggcagccctgccggcagccccacctccacagaggagggaaccagcaccgagcccagcgaaggcagcgccccaggcaccagcaccgagcctagtgagcaggagattaaacggatcaacaagatcagaagaagacttgtgaaagacagcaacaccaagaaggccggcaagacaggccccatgaaaaccctgctggttagagtgatgacacccgatctgagagagcggctggaaaacctgagaaagaagcctgaaaatatcccccagcccatcagcaatacatctagagccaacctgaataagctgctgaccgattacaccgaaatgaagaaggcgatcctgcatgtgtactgggaagagttccagaaggaccctgtgggcctgatgagccgggtggcccagcctgccagcaagaagatcgatcagaacaagctgaaacctgagatggacgagaagggcaacctgaccaccgccggctttgcctgctctcagtgtggccagcccctgttcgtgtacaagctggagcaggtgtctgagaagggcaaggcttacaccaactacttcggacggtgcaatgtggccgagcacgaaaagctgatcctgctggcccagctgaagcccgagaaggatagcgacgaagccgtgacatatagcctgggaaagtttgggcagagggccctggatttctacagcattcatgtgaccaaggagtccacccaccccgtgaagcccctggcccagatcgccggaaacagatacgcctccggacctgtgggaaaggccctgagcgacgcatgtatgggcacaatcgcctccttcctgtctaagtaccaggacatcatcatcgaacaccagaaggtggtgaagggcaaccagaagagactggagagcctgcgggagctggccggcaaggaaaacctggaataccctagcgtgaccctgccacctcagcctcacaccaaggagggcgttgatgcctacaacgaagtgatcgcccgggtgcgaatgtgggtgaacctgaacctgtggcagaagctgaagctaagcagagatgatgccaagcctctgctgagactgaagggattcccttcctttcctctggtcgagagacaggccaacgaagtggactggtgggacatggtgtgtaacgtgaagaagctgatcaacgagaaaaaggaggatggcaaggtgttttggcagaatctggctggctacaagagacaggaagccctgagaccatacctgagcagcgaggaagatcggaagaagggaaagaaattcgctcggtaccagctgggcgacctgctgctgcacctggaaaagaagcacggcgaggactggggaaaggtgtacgacgaggcctgggagcggattgacaagaaagtggaaggcctgagcaagcacatcaagctggaagaggaacggagaagcgaggacgcccagagcaaggccgccctgaccgactggctgcgggctaaggccagcttcgtgatcgagggcctgaaggaggccgacaaggacgagttctgcagatgcgagctgaagctgcagaagtggtacggggacctgcggggaaagcccttcgccatcgaagccgagaacagcatcctggacatcagcggcttcagcaagcagtacaactgtgccttcatctggcagaaggacggcgtgaagaagctgaacctgtacctgatcatcaactacttcaagggcggcaagctgcggttcaagaagatcaaacctgaagccttcgaagccaacagattctacaccgtgatcaacaaaaagagcggcgagatcgtgcccatggaggtgaacttcaacttcgacgaccccaacctgatcatcctgcctctggcctttggcaagagacagggcagagaattcatctggaacgacctgctgtccctggaaaccggcagcctgaagctggccaacggaagagtgatcgagaagacactgtacaacagaagaacccggcaggatgagcctgccctgttcgtggccctgaccttcgagcggcgggaggtcctggactcctccaatatcaaaccaatgaacctgatcggcgtggcaagaggcgaaaacatccccgccgtgatcgccctgaccgaccccgagggctgcccactgagccggtttaaggatagcctgggaaacccaacccacatcctgagaatcggcgagagctataaggagaagcagcggaccatccaggccaagaaggaggtggagcagcggagagccggcggctacagccggaagtacgccagcaaagccaagaatctggcagacgatatggtgagaaacaccgctagagatctgctgtactacgccgtgacccaggatgccatgctgatcttcgccaacctgagccggggcttcggccggcagggcaagcggaccttcatggccgagagacagtacacacggatggaggactggctgaccgccaagctggcctacgagggcctgagcaagacctacctgtccaagacactggcccagtacacctccaagacatgcagcaactgtgggtttaccatcaccagcgccgactacgacagggtgctggagaagctgaagaagacagcaacaggctggatgaccacaattaacggcaaggagctgaaggtggagggccagattacctactacaacagatacaagagacagaacgtagtcaaggacctgtccgtcgagctggatagactgagcgaagaatctgtgaacaacgacatctcctcctggacaaagggcagaagcggagaagctctgagcctcctgaagaaaagattctcccatagacccgtgcaggagaagttcgtgtgcctgaactgcggcttcgagacacacgcagccgagcaagccgccctgaacatcgccagatcctggctgttcctgcggagccaggagtacaagaaataccagacaaacaagacaaccggcaacaccgataagagagccttcgtcgagacctggcagtccttttaccggaagaagcttaaggaggtgtggaaacctgccgtgcggtctggcggatctggcggaggctcctgagatgggcctgctgacattcagagacatcgctatcgagttcagcctggaggaatggcaatgtctggactgcgcccagagaaatctgtacagagatgtgatgctggaaaactaccggaacctggtgtctctgggcatcgccgtgtccaagcccgacctgatcacctgcctcgagcagaacaaggaaagccagaacatcaagcggaacaaaatggtcgccaagcaccctgtgatgcacagccacggatctggctccggcagcggccccaagaaaaagagaaaagtctaagctgccttctgcggggcttgccttctggccatgcccttcttctctcccttgcacctgtacctcttggtctttgaataaagcctgagtaggaaggctagcaaaaaaaaaaaaaaaaaaaaaaaaaaaaaaaaaaaaaaaaaaaaaaaaaaaaaaaaaaaaaaaaaaaaaaaaaaaaaaaa

SEQ ID NO: 18522 - RNA, 9512 nt, synthetic construct
  source 1..9512: mol_type = other RNA
aggaaataagagagaaaagaagagtaagaagaaatataagagccaccatggcccctaagaagaagcgtaaagtgagccggatggaacgcctcgtctacgaggtgcggcagaagtgcagaaacatcgaggacatctgcatctcctgcggatctctgaacgtgaccctggagcacccactgttcatcggcggcatgtgccagaactgtaaaaactgttttctggagtgtgcctatcaatacgacgatgacggctaccagagctactgcaccatctgttgcggcggaagagaggtgctgatgtgtggaaataacaactgctgccggtgcttctgcgtggaatgcgtggacctgctggtgggccccggcgccgcccaggccgctattaaggaagatccttggaactgctacatgtgcggccacaagggcacatacggcctgctgagacggagagaggactggcctagcagactgcagatgttcttcgccaataaccacgaccaggagttcgacccccctaaggtgtaccctcccgtccccgccgagaagagaaagcccatccgggtcctgagcctgttcgatggcatcgccaccggtctgctggtgctgaaggacctgggcatccaggtggataggtacattgcctccgaggtgtgcgaggactccatcaccgtgggaatggtgcgtcatcagggcaagatcatgtacgtgggcgacgtgcggagcgtgacacagaagcatatccaggagtggggccctttcgacctggtgatcggcggcagcccttgcaatgacctgagcatcgtgaacccagcccggaagggcctgtacgagggaaccggcagactgttcttcgagttttacagactgctgcacgacgcccggcctaaggaaggcgacgaccggcccttcttttggctgttcgagaatgtggtggccatgggagtcagcgacaagcgggatattagccggttcctggagagcaaccccgtgatgatcgatgccaaggaagtgagcgccgcccaccgggccagatacttctggggcaatctgcctggcatgaacagacccctggccagcaccgtgaacgacaagctggagctgcaggagtgcctggagcacggccggatcgccaagttcagcaaggtgagaaccatcaccacccgaagcaacagcatcaaacaaggcaaggaccagcactttcctgtgttcatgaacgagaaggaggacatcctgtggtgtaccgagatggagagagtgttcgggttcccagtccactacacagatgtcagcaacatgtctagactggccagacagagactgctgggaagaagctggtccgtccctgtgatcagacacctgttcgcccctctgaaggagtacttcgcctgcgtgagcagcggcaacagcaacgccaacagccggggccccagcttctctagcggcctggtgccactgtccctgagagggagccacatgggccccatggagatctacaaaaccgtgagcgcctggaagcggcagcctgtgcgcgtgctgagcctgtttcggaatatcgataaagtcctgaaaagcctgggattcctggagagcggctctggctccggcggtggcaccctgaagtacgtggaggatgtgacaaacgtggtcagacgggatgtggagaagtggggccccttcgatctggtgtacggcagcacccaacccctgggcagctcttgtgaccggtgccctggctggtacatgtttcagttccaccggatcctgcagtacgccctgccgagacaggagtcccagcggccattcttttggattttcatggacaacttgctgctgaccgaggatgaccaggaaactaccactcggttcctgcagaccgaagccgtgaccctgcaggacgtgagaggccgggactaccagaacgccatgcgggtgtggtccaacatccctggactgaaaagcaagcacgcacctctgacccctaaagaagaggagtacctgcaggcccaggtgcggagcagaagcaagctggacgcccctaaggtggatctgctggtgaagaattgcctcctgcccctgagagagtacttcaagtatttcagccagaatagtctgcccctgggaggcagcggcggcggcgccctggtgacatttgaggacgtcgccgtgcggttcacccaggaggaatgggctctgctggatccttctcagaaaatcctgtaccgggacgtgatgagagagacataccggaatctgacctccgtgggcatcaactgggaatgttgggaccttgaagcctgcttcagaagcctgggaagaaacctgagagtgcaggtggtgaagagaaagtgcgagctgaccaacagcggcccctgcgccgagggcggcccaagcagcggcgcccctcctcccagcggcggcagcccagccggctccccaacctctaccgaggagggcacctctgagtccgccacccccgagagcggccctggcacctccaccgagcccagcgagggcagcgcacccggcagccctgccggcagccccacctccacagaggagggaaccagcaccgagcccagcgaaggcagcgccccaggcaccagcaccgagcctagtgagcaggagattaaacggatcaacaagatcagaagaagacttgtgaaagacagcaacaccaagaaggccggcaagacaggccccatgaaaaccctgctggttagagtgatgacacccgatctgagagagcggctggaaaacctgagaaagaagcctgaaaatatcccccagcccatcagcaatacatctagagccaacctgaataagctgctgaccgattacaccgaaatgaagaaggcgatcctgcatgtgtactgggaagagttccagaaggaccctgtgggcctgatgagccgggtggcccagcctgccagcaagaagatcgatcagaacaagctgaaacctgagatggacgagaagggcaacctgaccaccgccggctttgcctgctctcagtgtggccagcccctgttcgtgtacaagctggagcaggtgtctgagaagggcaaggcttacaccaactacttcggacggtgcaatgtggccgagcacgaaaagctgatcctgctggcccagctgaagcccgagaaggatagcgacgaagccgtgacatatagcctgggaaagtttgggcagagggccctggatttctacagcattcatgtgaccaaggagtccacccaccccgtgaagcccctggcccagatcgccggaaacagatacgcctccggacctgtgggaaaggccctgagcgacgcatgtatgggcacaatcgcctccttcctgtctaagtaccaggacatcatcatcgaacaccagaaggtggtgaagggcaaccagaagagactggagagcctgcgggagctggccggcaaggaaaacctggaataccctagcgtgaccctgccacctcagcctcacaccaaggagggcgttgatgcctacaacgaagtgatcgcccgggtgcgaatgtgggtgaacctgaacctgtggcagaagctgaagctaagcagagatgatgccaagcctctgctgagactgaagggattcccttcctttcctctggtcgagagacaggccaacgaagtggactggtgggacatggtgtgtaacgtgaagaagctgatcaacgagaaaaaggaggatggcaaggtgttttggcagaatctggctggctacaagagacaggaagccctgagaccatacctgagcagcgaggaagatcggaagaagggaaagaaattcgctcggtaccagctgggcgacctgctgctgcacctggaaaagaagcacggcgaggactggggaaaggtgtacgacgaggcctgggagcggattgacaagaaagtggaaggcctgagcaagcacatcaagctggaagaggaacggagaagcgaggacgcccagagcaaggccgccctgaccgactggctgcgggctaaggccagcttcgtgatcgagggcctgaaggaggccgacaaggacgagttctgcagatgcgagctgaagctgcagaagtggtacggggacctgcggggaaagcccttcgccatcgaagccgagaacagcatcctggacatcagcggcttcagcaagcagtacaactgtgccttcatctggcagaaggacggcgtgaagaagctgaacctgtacctgatcatcaactacttcaagggcggcaagctgcggttcaagaagatcaaacctgaagccttcgaagccaacagattctacaccgtgatcaacaaaaagagcggcgagatcgtgcccatggaggtgaacttcaacttcgacgaccccaacctgatcatcctgcctctggcctttggcaagagacagggcagagaattcatctggaacgacctgctgtccctggaaaccggcagcctgaagctggccaacggaagagtgatcgagaagacactgtacaacagaagaacccggcaggatgagcctgccctgttcgtggccctgaccttcgagcggcgggaggtcctggactcctccaatatcaaaccaatgaacctgatcggcgtggcaagaggcgaaaacatccccgccgtgatcgccctgaccgaccccgagggctgcccactgagccggtttaaggatagcctgggaaacccaacccacatcctgagaatcggcgagagctataaggagaagcagcggaccatccaggccaagaaggaggtggagcagcggagagccggcggctacagccggaagtacgccagcaaagccaagaatctggcagacgatatggtgagaaacaccgctagagatctgctgtactacgccgtgacccaggatgccatgctgatcttcgccaacctgagccggggcttcggccggcagggcaagcggaccttcatggccgagagacagtacacacggatggaggactggctgaccgccaagctggcctacgagggcctgagcaagacctacctgtccaagacactggcccagtacacctccaagacatgcagcaactgtgggtttaccatcaccagcgccgactacgacagggtgctggagaagctgaagaagacagcaacaggctggatgaccacaattaacggcaaggagctgaaggtggagggccagattacctactacaacagatacaagagacagaacgtagtcaaggacctgtccgtcgagctggatagactgagcgaagaatctgtgaacaacgacatctcctcctggacaaagggcagaagcggagaagctctgagcctcctgaagaaaagattctcccatagacccgtgcaggagaagttcgtgtgcctgaactgcggcttcgagacacacgcagccgagcaagccgccctgaacatcgccagatcctggctgttcctgcggagccaggagtacaagaaataccagacaaacaagacaaccggcaacaccgataagagagccttcgtcgagacctggcagtccttttaccggaagaagcttaaggaggtgtggaaacctgccgtgcggtctggcggatctggcggaggctccgtcgccttccgggacgtgatcgtggacttcacccaggaggaatggcagcagctgaagcctgctcaaaaggacctgtacagagatgtgatgatggaaatctactggaatctggtgtctctggacctggaaaccgagggagatatgaacgagcctgaccccgagaaagacagctgggaggatagaacaagcatcgtggttgtggaaggcctgatgcggaacggcgcccagggctacgcctgcgagaaggccggcatccagggctgtagagtgggcggcccaagcagcggcgcccctcctcccagcggcggcagcccagccggctccccaacctctaccgaggagggcacctctgagtccgccacccccgagagcggccctggcacctccaccgagcccagcgagggcagcgcacccggcagccctgccggcagccccacctccacagaggagggaaccagcaccgagcccagcgaaggcagcgccccaggcaccagcaccgagcctagtgagcaggagattaaacggatcaacaagatcagaagaagacttgtgaaagacagcaacaccaagaaggccggcaagacaggccccatgaaaaccctgctggttagagtgatgacacccgatctgagagagcggctggaaaacctgagaaagaagcctgaaaatatcccccagcccatcagcaatacatctagagccaacctgaataagctgctgaccgattacaccgaaatgaagaaggcgatcctgcatgtgtactgggaagagttccagaaggaccctgtgggcctgatgagccgggtggcccagcctgccagcaagaagatcgatcagaacaagctgaaacctgagatggacgagaagggcaacctgaccaccgccggctttgcctgctctcagtgtggccagcccctgttcgtgtacaagctggagcaggtgtctgagaagggcaaggcttacaccaactacttcggacggtgcaatgtggccgagcacgaaaagctgatcctgctggcccagctgaagcccgagaaggatagcgacgaagccgtgacatatagcctgggaaagtttgggcagagggccctggatttctacagcattcatgtgaccaaggagtccacccaccccgtgaagcccctggcccagatcgccggaaacagatacgcctccggacctgtgggaaaggccctgagcgacgcatgtatgggcacaatcgcctccttcctgtctaagtaccaggacatcatcatcgaacaccagaaggtggtgaagggcaaccagaagagactggagagcctgcgggagctggccggcaaggaaaacctggaataccctagcgtgaccctgccacctcagcctcacaccaaggagggcgttgatgcctacaacgaagtgatcgcccgggtgcgaatgtgggtgaacctgaacctgtggcagaagctgaagctaagcagagatgatgccaagcctctgctgagactgaagggattcccttcctttcctctggtcgagagacaggccaacgaagtggactggtgggacatggtgtgtaacgtgaagaagctgatcaacgagaaaaaggaggatggcaaggtgttttggcagaatctggctggctacaagagacaggaagccctgagaccatacctgagcagcgaggaagatcggaagaagggaaagaaattcgctcggtaccagctgggcgacctgctgctgcacctggaaaagaagcacggcgaggactggggaaaggtgtacgacgaggcctgggagcggattgacaagaaagtggaaggcctgagcaagcacatcaagctggaagaggaacggagaagcgaggacgcccagagcaaggccgccctgaccgactggctgcgggctaaggccagcttcgtgatcgagggcctgaaggaggccgacaaggacgagttctgcagatgcgagctgaagctgcagaagtggtacggggacctgcggggaaagcccttcgccatcgaagccgagaacagcatcctggacatcagcggcttcagcaagcagtacaactgtgccttcatctggcagaaggacggcgtgaagaagctgaacctgtacctgatcatcaactacttcaagggcggcaagctgcggttcaagaagatcaaacctgaagccttcgaagccaacagattctacaccgtgatcaacaaaaagagcggcgagatcgtgcccatggaggtgaacttcaacttcgacgaccccaacctgatcatcctgcctctggcctttggcaagagacagggcagagaattcatctggaacgacctgctgtccctggaaaccggcagcctgaagctggccaacggaagagtgatcgagaagacactgtacaacagaagaacccggcaggatgagcctgccctgttcgtggccctgaccttcgagcggcgggaggtcctggactcctccaatatcaaaccaatgaacctgatcggcgtggcaagaggcgaaaacatccccgccgtgatcgccctgaccgaccccgagggctgcccactgagccggtttaaggatagcctgggaaacccaacccacatcctgagaatcggcgagagctataaggagaagcagcggaccatccaggccaagaaggaggtggagcagcggagagccggcggctacagccggaagtacgccagcaaagccaagaatctggcagacgatatggtgagaaacaccgctagagatctgctgtactacgccgtgacccaggatgccatgctgatcttcgccaacctgagccggggcttcggccggcagggcaagcggaccttcatggccgagagacagtacacacggatggaggactggctgaccgccaagctggcctacgagggcctgagcaagacctacctgtccaagacactggcccagtacacctccaagacatgcagcaactgtgggtttaccatcaccagcgccgactacgacagggtgctggagaagctgaagaagacagcaacaggctggatgaccacaattaacggcaaggagctgaaggtggagggccagattacctactacaacagatacaagagacagaacgtagtcaaggacctgtccgtcgagctggatagactgagcgaagaatctgtgaacaacgacatctcctcctggacaaagggcagaagcggagaagctctgagcctcctgaagaaaagattctcccatagacccgtgcaggagaagttcgtgtgcctgaactgcggcttcgagacacacgcagccgagcaagccgccctgaacatcgccagatcctggctgttcctgcggagccaggagtacaagaaataccagacaaacaagacaaccggcaacaccgataagagagccttcgtcgagacctggcagtccttttaccggaagaagcttaaggaggtgtggaaacctgccgtgcggtctggcggatctggcggaggctcctctgctgaccttcgaggacgtcgccgtgtccttcagcgaggaagaatgggagctgctcgatcctcctcagaaaaccctgtacaacgacgtgatgcaagagaactacgagacagtgatctctctgggcctgaagctgaagaacgacaccggaaatgatcagcccatcagcatcagcgccctggaaatgcaggccagcggcagcaaggtgctgcggaaggccagaatgaaagtggctcagaagacaggatctggctccggcagcggccccaagaaaaagagaaaagtctaagctgccttctgcggggcttgccttctggccatgcccttcttctctcccttgcacctgtacctcttggtctttgaataaagcctgagtaggaaggctagcaaaaaaaaaaaaaaaaaaaaaaaaaaaaaaaaaaaaaaaaaaaaaaaaaaaaaaaaaaaaaaaaaaaaaaaaaaaaaaaa

SEQ ID NO: 18523 - RNA, 9494 nt, synthetic construct
  source 1..9494: mol_type = other RNA
aggaaataagagagaaaagaagagtaagaagaaatataagagccaccatggcccctaagaagaagcgtaaagtgagccggatggaacgcctcgtctacgaggtgcggcagaagtgcagaaacatcgaggacatctgcatctcctgcggatctctgaacgtgaccctggagcacccactgttcatcggcggcatgtgccagaactgtaaaaactgttttctggagtgtgcctatcaatacgacgatgacggctaccagagctactgcaccatctgttgcggcggaagagaggtgctgatgtgtggaaataacaactgctgccggtgcttctgcgtggaatgcgtggacctgctggtgggccccggcgccgcccaggccgctattaaggaagatccttggaactgctacatgtgcggccacaagggcacatacggcctgctgagacggagagaggactggcctagcagactgcagatgttcttcgccaataaccacgaccaggagttcgacccccctaaggtgtaccctcccgtccccgccgagaagagaaagcccatccgggtcctgagcctgttcgatggcatcgccaccggtctgctggtgctgaaggacctgggcatccaggtggataggtacattgcctccgaggtgtgcgaggactccatcaccgtgggaatggtgcgtcatcagggcaagatcatgtacgtgggcgacgtgcggagcgtgacacagaagcatatccaggagtggggccctttcgacctggtgatcggcggcagcccttgcaatgacctgagcatcgtgaacccagcccggaagggcctgtacgagggaaccggcagactgttcttcgagttttacagactgctgcacgacgcccggcctaaggaaggcgacgaccggcccttcttttggctgttcgagaatgtggtggccatgggagtcagcgacaagcgggatattagccggttcctggagagcaaccccgtgatgatcgatgccaaggaagtgagcgccgcccaccgggccagatacttctggggcaatctgcctggcatgaacagacccctggccagcaccgtgaacgacaagctggagctgcaggagtgcctggagcacggccggatcgccaagttcagcaaggtgagaaccatcaccacccgaagcaacagcatcaaacaaggcaaggaccagcactttcctgtgttcatgaacgagaaggaggacatcctgtggtgtaccgagatggagagagtgttcgggttcccagtccactacacagatgtcagcaacatgtctagactggccagacagagactgctgggaagaagctggtccgtccctgtgatcagacacctgttcgcccctctgaaggagtacttcgcctgcgtgagcagcggcaacagcaacgccaacagccggggccccagcttctctagcggcctggtgccactgtccctgagagggagccacatgggccccatggagatctacaaaaccgtgagcgcctggaagcggcagcctgtgcgcgtgctgagcctgtttcggaatatcgataaagtcctgaaaagcctgggattcctggagagcggctctggctccggcggtggcaccctgaagtacgtggaggatgtgacaaacgtggtcagacgggatgtggagaagtggggccccttcgatctggtgtacggcagcacccaacccctgggcagctcttgtgaccggtgccctggctggtacatgtttcagttccaccggatcctgcagtacgccctgccgagacaggagtcccagcggccattcttttggattttcatggacaacttgctgctgaccgaggatgaccaggaaactaccactcggttcctgcagaccgaagccgtgaccctgcaggacgtgagaggccgggactaccagaacgccatgcgggtgtggtccaacatccctggactgaaaagcaagcacgcacctctgacccctaaagaagaggagtacctgcaggcccaggtgcggagcagaagcaagctggacgcccctaaggtggatctgctggtgaagaattgcctcctgcccctgagagagtacttcaagtatttcagccagaatagtctgcccctgggaggcagcggcggcggcgccctggtgacatttgaggacgtcgccgtgcggttcacccaggaggaatgggctctgctggatccttctcagaaaatcctgtaccgggacgtgatgagagagacataccggaatctgacctccgtgggcatcaactgggaatgttgggaccttgaagcctgcttcagaagcctgggaagaaacctgagagtgcaggtggtgaagagaaagtgcgagctgaccaacagcggcccctgcgccgagggcggcccaagcagcggcgcccctcctcccagcggcggcagcccagccggctccccaacctctaccgaggagggcacctctgagtccgccacccccgagagcggccctggcacctccaccgagcccagcgagggcagcgcacccggcagccctgccggcagccccacctccacagaggagggaaccagcaccgagcccagcgaaggcagcgccccaggcaccagcaccgagcctagtgagcaggagattaaacggatcaacaagatcagaagaagacttgtgaaagacagcaacaccaagaaggccggcaagacaggccccatgaaaaccctgctggttagagtgatgacacccgatctgagagagcggctggaaaacctgagaaagaagcctgaaaatatcccccagcccatcagcaatacatctagagccaacctgaataagctgctgaccgattacaccgaaatgaagaaggcgatcctgcatgtgtactgggaagagttccagaaggaccctgtgggcctgatgagccgggtggcccagcctgccagcaagaagatcgatcagaacaagctgaaacctgagatggacgagaagggcaacctgaccaccgccggctttgcctgctctcagtgtggccagcccctgttcgtgtacaagctggagcaggtgtctgagaagggcaaggcttacaccaactacttcggacggtgcaatgtggccgagcacgaaaagctgatcctgctggcccagctgaagcccgagaaggatagcgacgaagccgtgacatatagcctgggaaagtttgggcagagggccctggatttctacagcattcatgtgaccaaggagtccacccaccccgtgaagcccctggcccagatcgccggaaacagatacgcctccggacctgtgggaaaggccctgagcgacgcatgtatgggcacaatcgcctccttcctgtctaagtaccaggacatcatcatcgaacaccagaaggtggtgaagggcaaccagaagagactggagagcctgcgggagctggccggcaaggaaaacctggaataccctagcgtgaccctgccacctcagcctcacaccaaggagggcgttgatgcctacaacgaagtgatcgcccgggtgcgaatgtgggtgaacctgaacctgtggcagaagctgaagctaagcagagatgatgccaagcctctgctgagactgaagggattcccttcctttcctctggtcgagagacaggccaacgaagtggactggtgggacatggtgtgtaacgtgaagaagctgatcaacgagaaaaaggaggatggcaaggtgttttggcagaatctggctggctacaagagacaggaagccctgagaccatacctgagcagcgaggaagatcggaagaagggaaagaaattcgctcggtaccagctgggcgacctgctgctgcacctggaaaagaagcacggcgaggactggggaaaggtgtacgacgaggcctgggagcggattgacaagaaagtggaaggcctgagcaagcacatcaagctggaagaggaacggagaagcgaggacgcccagagcaaggccgccctgaccgactggctgcgggctaaggccagcttcgtgatcgagggcctgaaggaggccgacaaggacgagttctgcagatgcgagctgaagctgcagaagtggtacggggacctgcggggaaagcccttcgccatcgaagccgagaacagcatcctggacatcagcggcttcagcaagcagtacaactgtgccttcatctggcagaaggacggcgtgaagaagctgaacctgtacctgatcatcaactacttcaagggcggcaagctgcggttcaagaagatcaaacctgaagccttcgaagccaacagattctacaccgtgatcaacaaaaagagcggcgagatcgtgcccatggaggtgaacttcaacttcgacgaccccaacctgatcatcctgcctctggcctttggcaagagacagggcagagaattcatctggaacgacctgctgtccctggaaaccggcagcctgaagctggccaacggaagagtgatcgagaagacactgtacaacagaagaacccggcaggatgagcctgccctgttcgtggccctgaccttcgagcggcgggaggtcctggactcctccaatatcaaaccaatgaacctgatcggcgtggcaagaggcgaaaacatccccgccgtgatcgccctgaccgaccccgagggctgcccactgagccggtttaaggatagcctgggaaacccaacccacatcctgagaatcggcgagagctataaggagaagcagcggaccatccaggccaagaaggaggtggagcagcggagagccggcggctacagccggaagtacgccagcaaagccaagaatctggcagacgatatggtgagaaacaccgctagagatctgctgtactacgccgtgacccaggatgccatgctgatcttcgccaacctgagccggggcttcggccggcagggcaagcggaccttcatggccgagagacagtacacacggatggaggactggctgaccgccaagctggcctacgagggcctgagcaagacctacctgtccaagacactggcccagtacacctccaagacatgcagcaactgtgggtttaccatcaccagcgccgactacgacagggtgctggagaagctgaagaagacagcaacaggctggatgaccacaattaacggcaaggagctgaaggtggagggccagattacctactacaacagatacaagagacagaacgtagtcaaggacctgtccgtcgagctggatagactgagcgaagaatctgtgaacaacgacatctcctcctggacaaagggcagaagcggagaagctctgagcctcctgaagaaaagattctcccatagacccgtgcaggagaagttcgtgtgcctgaactgcggcttcgagacacacgcagccgagcaagccgccctgaacatcgccagatcctggctgttcctgcggagccaggagtacaagaaataccagacaaacaagacaaccggcaacaccgataagagagccttcgtcgagacctggcagtccttttaccggaagaagcttaaggaggtgtggaaacctgccgtgcggtctggcggatctggcggaggctccgtgacctacaacgacgtgcacgtggacatcacccaggaggaatgggctctgatggaccccagccagcggaacctgtacaaggatgtgatggtcgagacatacatgaacctgaccgccatcggatataattgggagaacctggaagtggaagaaccatgtcagaaccccctgaagcacggcagacacgagagacctcatacaggcgagaaaccttacgagtacaatcagtgcggcaaggccttcgcccaacctggcggcccaagcagcggcgcccctcctcccagcggcggcagcccagccggctccccaacctctaccgaggagggcacctctgagtccgccacccccgagagcggccctggcacctccaccgagcccagcgagggcagcgcacccggcagccctgccggcagccccacctccacagaggagggaaccagcaccgagcccagcgaaggcagcgccccaggcaccagcaccgagcctagtgagcaggagattaaacggatcaacaagatcagaagaagacttgtgaaagacagcaacaccaagaaggccggcaagacaggccccatgaaaaccctgctggttagagtgatgacacccgatctgagagagcggctggaaaacctgagaaagaagcctgaaaatatcccccagcccatcagcaatacatctagagccaacctgaataagctgctgaccgattacaccgaaatgaagaaggcgatcctgcatgtgtactgggaagagttccagaaggaccctgtgggcctgatgagccgggtggcccagcctgccagcaagaagatcgatcagaacaagctgaaacctgagatggacgagaagggcaacctgaccaccgccggctttgcctgctctcagtgtggccagcccctgttcgtgtacaagctggagcaggtgtctgagaagggcaaggcttacaccaactacttcggacggtgcaatgtggccgagcacgaaaagctgatcctgctggcccagctgaagcccgagaaggatagcgacgaagccgtgacatatagcctgggaaagtttgggcagagggccctggatttctacagcattcatgtgaccaaggagtccacccaccccgtgaagcccctggcccagatcgccggaaacagatacgcctccggacctgtgggaaaggccctgagcgacgcatgtatgggcacaatcgcctccttcctgtctaagtaccaggacatcatcatcgaacaccagaaggtggtgaagggcaaccagaagagactggagagcctgcgggagctggccggcaaggaaaacctggaataccctagcgtgaccctgccacctcagcctcacaccaaggagggcgttgatgcctacaacgaagtgatcgcccgggtgcgaatgtgggtgaacctgaacctgtggcagaagctgaagctaagcagagatgatgccaagcctctgctgagactgaagggattcccttcctttcctctggtcgagagacaggccaacgaagtggactggtgggacatggtgtgtaacgtgaagaagctgatcaacgagaaaaaggaggatggcaaggtgttttggcagaatctggctggctacaagagacaggaagccctgagaccatacctgagcagcgaggaagatcggaagaagggaaagaaattcgctcggtaccagctgggcgacctgctgctgcacctggaaaagaagcacggcgaggactggggaaaggtgtacgacgaggcctgggagcggattgacaagaaagtggaaggcctgagcaagcacatcaagctggaagaggaacggagaagcgaggacgcccagagcaaggccgccctgaccgactggctgcgggctaaggccagcttcgtgatcgagggcctgaaggaggccgacaaggacgagttctgcagatgcgagctgaagctgcagaagtggtacggggacctgcggggaaagcccttcgccatcgaagccgagaacagcatcctggacatcagcggcttcagcaagcagtacaactgtgccttcatctggcagaaggacggcgtgaagaagctgaacctgtacctgatcatcaactacttcaagggcggcaagctgcggttcaagaagatcaaacctgaagccttcgaagccaacagattctacaccgtgatcaacaaaaagagcggcgagatcgtgcccatggaggtgaacttcaacttcgacgaccccaacctgatcatcctgcctctggcctttggcaagagacagggcagagaattcatctggaacgacctgctgtccctggaaaccggcagcctgaagctggccaacggaagagtgatcgagaagacactgtacaacagaagaacccggcaggatgagcctgccctgttcgtggccctgaccttcgagcggcgggaggtcctggactcctccaatatcaaaccaatgaacctgatcggcgtggcaagaggcgaaaacatccccgccgtgatcgccctgaccgaccccgagggctgcccactgagccggtttaaggatagcctgggaaacccaacccacatcctgagaatcggcgagagctataaggagaagcagcggaccatccaggccaagaaggaggtggagcagcggagagccggcggctacagccggaagtacgccagcaaagccaagaatctggcagacgatatggtgagaaacaccgctagagatctgctgtactacgccgtgacccaggatgccatgctgatcttcgccaacctgagccggggcttcggccggcagggcaagcggaccttcatggccgagagacagtacacacggatggaggactggctgaccgccaagctggcctacgagggcctgagcaagacctacctgtccaagacactggcccagtacacctccaagacatgcagcaactgtgggtttaccatcaccagcgccgactacgacagggtgctggagaagctgaagaagacagcaacaggctggatgaccacaattaacggcaaggagctgaaggtggagggccagattacctactacaacagatacaagagacagaacgtagtcaaggacctgtccgtcgagctggatagactgagcgaagaatctgtgaacaacgacatctcctcctggacaaagggcagaagcggagaagctctgagcctcctgaagaaaagattctcccatagacccgtgcaggagaagttcgtgtgcctgaactgcggcttcgagacacacgcagccgagcaagccgccctgaacatcgccagatcctggctgttcctgcggagccaggagtacaagaaataccagacaaacaagacaaccggcaacaccgataagagagccttcgtcgagacctggcagtccttttaccggaagaagcttaaggaggtgtggaaacctgccgtgcggtctggcggatctggcggaggctcctgccctggtgacatttgaggacgtcgccgtgcggttcacccaggaggaatgggctctgctggatccttctcagaaaatcctgtaccgggacgtgatgagagagacataccggaatctgacctccgtgggcatcaactgggaatgttgggaccttgaagcctgcttcagaagcctgggaagaaacctgagagtgcaggtggtgaagagaaagtgcgagctgaccaacagcggcccctgcgccgagggatctggctccggcagcggccccaagaaaaagagaaaagtctaagctgccttctgcggggcttgccttctggccatgcccttcttctctcccttgcacctgtacctcttggtctttgaataaagcctgagtaggaaggctagcaaaaaaaaaaaaaaaaaaaaaaaaaaaaaaaaaaaaaaaaaaaaaaaaaaaaaaaaaaaaaaaaaaaaaaaaaaaaaaaa

SEQ ID NO: 18524 - RNA, 9494 nt, synthetic construct
  source 1..9494: mol_type = other RNA
aggaaataagagagaaaagaagagtaagaagaaatataagagccaccatggcccctaagaagaagcgtaaagtgagccggatggaacgcctcgtctacgaggtgcggcagaagtgcagaaacatcgaggacatctgcatctcctgcggatctctgaacgtgaccctggagcacccactgttcatcggcggcatgtgccagaactgtaaaaactgttttctggagtgtgcctatcaatacgacgatgacggctaccagagctactgcaccatctgttgcggcggaagagaggtgctgatgtgtggaaataacaactgctgccggtgcttctgcgtggaatgcgtggacctgctggtgggccccggcgccgcccaggccgctattaaggaagatccttggaactgctacatgtgcggccacaagggcacatacggcctgctgagacggagagaggactggcctagcagactgcagatgttcttcgccaataaccacgaccaggagttcgacccccctaaggtgtaccctcccgtccccgccgagaagagaaagcccatccgggtcctgagcctgttcgatggcatcgccaccggtctgctggtgctgaaggacctgggcatccaggtggataggtacattgcctccgaggtgtgcgaggactccatcaccgtgggaatggtgcgtcatcagggcaagatcatgtacgtgggcgacgtgcggagcgtgacacagaagcatatccaggagtggggccctttcgacctggtgatcggcggcagcccttgcaatgacctgagcatcgtgaacccagcccggaagggcctgtacgagggaaccggcagactgttcttcgagttttacagactgctgcacgacgcccggcctaaggaaggcgacgaccggcccttcttttggctgttcgagaatgtggtggccatgggagtcagcgacaagcgggatattagccggttcctggagagcaaccccgtgatgatcgatgccaaggaagtgagcgccgcccaccgggccagatacttctggggcaatctgcctggcatgaacagacccctggccagcaccgtgaacgacaagctggagctgcaggagtgcctggagcacggccggatcgccaagttcagcaaggtgagaaccatcaccacccgaagcaacagcatcaaacaaggcaaggaccagcactttcctgtgttcatgaacgagaaggaggacatcctgtggtgtaccgagatggagagagtgttcgggttcccagtccactacacagatgtcagcaacatgtctagactggccagacagagactgctgggaagaagctggtccgtccctgtgatcagacacctgttcgcccctctgaaggagtacttcgcctgcgtgagcagcggcaacagcaacgccaacagccggggccccagcttctctagcggcctggtgccactgtccctgagagggagccacatgggccccatggagatctacaaaaccgtgagcgcctggaagcggcagcctgtgcgcgtgctgagcctgtttcggaatatcgataaagtcctgaaaagcctgggattcctggagagcggctctggctccggcggtggcaccctgaagtacgtggaggatgtgacaaacgtggtcagacgggatgtggagaagtggggccccttcgatctggtgtacggcagcacccaacccctgggcagctcttgtgaccggtgccctggctggtacatgtttcagttccaccggatcctgcagtacgccctgccgagacaggagtcccagcggccattcttttggattttcatggacaacttgctgctgaccgaggatgaccaggaaactaccactcggttcctgcagaccgaagccgtgaccctgcaggacgtgagaggccgggactaccagaacgccatgcgggtgtggtccaacatccctggactgaaaagcaagcacgcacctctgacccctaaagaagaggagtacctgcaggcccaggtgcggagcagaagcaagctggacgcccctaaggtggatctgctggtgaagaattgcctcctgcccctgagagagtacttcaagtatttcagccagaatagtctgcccctgggaggcagcggcggcggcgccctggtgacatttgaggacgtcgccgtgcggttcacccaggaggaatgggctctgctggatccttctcagaaaatcctgtaccgggacgtgatgagagagacataccggaatctgacctccgtgggcatcaactgggaatgttgggaccttgaagcctgcttcagaagcctgggaagaaacctgagagtgcaggtggtgaagagaaagtgcgagctgaccaacagcggcccctgcgccgagggcggcccaagcagcggcgcccctcctcccagcggcggcagcccagccggctccccaacctctaccgaggagggcacctctgagtccgccacccccgagagcggccctggcacctccaccgagcccagcgagggcagcgcacccggcagccctgccggcagccccacctccacagaggagggaaccagcaccgagcccagcgaaggcagcgccccaggcaccagcaccgagcctagtgagcaggagattaaacggatcaacaagatcagaagaagacttgtgaaagacagcaacaccaagaaggccggcaagacaggccccatgaaaaccctgctggttagagtgatgacacccgatctgagagagcggctggaaaacctgagaaagaagcctgaaaatatcccccagcccatcagcaatacatctagagccaacctgaataagctgctgaccgattacaccgaaatgaagaaggcgatcctgcatgtgtactgggaagagttccagaaggaccctgtgggcctgatgagccgggtggcccagcctgccagcaagaagatcgatcagaacaagctgaaacctgagatggacgagaagggcaacctgaccaccgccggctttgcctgctctcagtgtggccagcccctgttcgtgtacaagctggagcaggtgtctgagaagggcaaggcttacaccaactacttcggacggtgcaatgtggccgagcacgaaaagctgatcctgctggcccagctgaagcccgagaaggatagcgacgaagccgtgacatatagcctgggaaagtttgggcagagggccctggatttctacagcattcatgtgaccaaggagtccacccaccccgtgaagcccctggcccagatcgccggaaacagatacgcctccggacctgtgggaaaggccctgagcgacgcatgtatgggcacaatcgcctccttcctgtctaagtaccaggacatcatcatcgaacaccagaaggtggtgaagggcaaccagaagagactggagagcctgcgggagctggccggcaaggaaaacctggaataccctagcgtgaccctgccacctcagcctcacaccaaggagggcgttgatgcctacaacgaagtgatcgcccgggtgcgaatgtgggtgaacctgaacctgtggcagaagctgaagctaagcagagatgatgccaagcctctgctgagactgaagggattcccttcctttcctctggtcgagagacaggccaacgaagtggactggtgggacatggtgtgtaacgtgaagaagctgatcaacgagaaaaaggaggatggcaaggtgttttggcagaatctggctggctacaagagacaggaagccctgagaccatacctgagcagcgaggaagatcggaagaagggaaagaaattcgctcggtaccagctgggcgacctgctgctgcacctggaaaagaagcacggcgaggactggggaaaggtgtacgacgaggcctgggagcggattgacaagaaagtggaaggcctgagcaagcacatcaagctggaagaggaacggagaagcgaggacgcccagagcaaggccgccctgaccgactggctgcgggctaaggccagcttcgtgatcgagggcctgaaggaggccgacaaggacgagttctgcagatgcgagctgaagctgcagaagtggtacggggacctgcggggaaagcccttcgccatcgaagccgagaacagcatcctggacatcagcggcttcagcaagcagtacaactgtgccttcatctggcagaaggacggcgtgaagaagctgaacctgtacctgatcatcaactacttcaagggcggcaagctgcggttcaagaagatcaaacctgaagccttcgaagccaacagattctacaccgtgatcaacaaaaagagcggcgagatcgtgcccatggaggtgaacttcaacttcgacgaccccaacctgatcatcctgcctctggcctttggcaagagacagggcagagaattcatctggaacgacctgctgtccctggaaaccggcagcctgaagctggccaacggaagagtgatcgagaagacactgtacaacagaagaacccggcaggatgagcctgccctgttcgtggccctgaccttcgagcggcgggaggtcctggactcctccaatatcaaaccaatgaacctgatcggcgtggcaagaggcgaaaacatccccgccgtgatcgccctgaccgaccccgagggctgcccactgagccggtttaaggatagcctgggaaacccaacccacatcctgagaatcggcgagagctataaggagaagcagcggaccatccaggccaagaaggaggtggagcagcggagagccggcggctacagccggaagtacgccagcaaagccaagaatctggcagacgatatggtgagaaacaccgctagagatctgctgtactacgccgtgacccaggatgccatgctgatcttcgccaacctgagccggggcttcggccggcagggcaagcggaccttcatggccgagagacagtacacacggatggaggactggctgaccgccaagctggcctacgagggcctgagcaagacctacctgtccaagacactggcccagtacacctccaagacatgcagcaactgtgggtttaccatcaccagcgccgactacgacagggtgctggagaagctgaagaagacagcaacaggctggatgaccacaattaacggcaaggagctgaaggtggagggccagattacctactacaacagatacaagagacagaacgtagtcaaggacctgtccgtcgagctggatagactgagcgaagaatctgtgaacaacgacatctcctcctggacaaagggcagaagcggagaagctctgagcctcctgaagaaaagattctcccatagacccgtgcaggagaagttcgtgtgcctgaactgcggcttcgagacacacgcagccgagcaagccgccctgaacatcgccagatcctggctgttcctgcggagccaggagtacaagaaataccagacaaacaagacaaccggcaacaccgataagagagccttcgtcgagacctggcagtccttttaccggaagaagcttaaggaggtgtggaaacctgccgtgcggtctggcggatctggcggaggctccgtgacctacaacgacgtgcacgtggacatcacccaggaggaatgggctctgatggaccccagccagcggaacctgtacaaggatgtgatggtcgagacatacatgaacctgaccgccatcggatataattgggagaacctggaagtggaagaaccatgtcagaaccccctgaagcacggcagacacgagagacctcatacaggcgagaaaccttacgagtacaatcagtgcggcaaggccttcgcccaacctggcggcccaagcagcggcgcccctcctcccagcggcggcagcccagccggctccccaacctctaccgaggagggcacctctgagtccgccacccccgagagcggccctggcacctccaccgagcccagcgagggcagcgcacccggcagccctgccggcagccccacctccacagaggagggaaccagcaccgagcccagcgaaggcagcgccccaggcaccagcaccgagcctagtgagcaggagattaaacggatcaacaagatcagaagaagacttgtgaaagacagcaacaccaagaaggccggcaagacaggccccatgaaaaccctgctggttagagtgatgacacccgatctgagagagcggctggaaaacctgagaaagaagcctgaaaatatcccccagcccatcagcaatacatctagagccaacctgaataagctgctgaccgattacaccgaaatgaagaaggcgatcctgcatgtgtactgggaagagttccagaaggaccctgtgggcctgatgagccgggtggcccagcctgccagcaagaagatcgatcagaacaagctgaaacctgagatggacgagaagggcaacctgaccaccgccggctttgcctgctctcagtgtggccagcccctgttcgtgtacaagctggagcaggtgtctgagaagggcaaggcttacaccaactacttcggacggtgcaatgtggccgagcacgaaaagctgatcctgctggcccagctgaagcccgagaaggatagcgacgaagccgtgacatatagcctgggaaagtttgggcagagggccctggatttctacagcattcatgtgaccaaggagtccacccaccccgtgaagcccctggcccagatcgccggaaacagatacgcctccggacctgtgggaaaggccctgagcgacgcatgtatgggcacaatcgcctccttcctgtctaagtaccaggacatcatcatcgaacaccagaaggtggtgaagggcaaccagaagagactggagagcctgcgggagctggccggcaaggaaaacctggaataccctagcgtgaccctgccacctcagcctcacaccaaggagggcgttgatgcctacaacgaagtgatcgcccgggtgcgaatgtgggtgaacctgaacctgtggcagaagctgaagctaagcagagatgatgccaagcctctgctgagactgaagggattcccttcctttcctctggtcgagagacaggccaacgaagtggactggtgggacatggtgtgtaacgtgaagaagctgatcaacgagaaaaaggaggatggcaaggtgttttggcagaatctggctggctacaagagacaggaagccctgagaccatacctgagcagcgaggaagatcggaagaagggaaagaaattcgctcggtaccagctgggcgacctgctgctgcacctggaaaagaagcacggcgaggactggggaaaggtgtacgacgaggcctgggagcggattgacaagaaagtggaaggcctgagcaagcacatcaagctggaagaggaacggagaagcgaggacgcccagagcaaggccgccctgaccgactggctgcgggctaaggccagcttcgtgatcgagggcctgaaggaggccgacaaggacgagttctgcagatgcgagctgaagctgcagaagtggtacggggacctgcggggaaagcccttcgccatcgaagccgagaacagcatcctggacatcagcggcttcagcaagcagtacaactgtgccttcatctggcagaaggacggcgtgaagaagctgaacctgtacctgatcatcaactacttcaagggcggcaagctgcggttcaagaagatcaaacctgaagccttcgaagccaacagattctacaccgtgatcaacaaaaagagcggcgagatcgtgcccatggaggtgaacttcaacttcgacgaccccaacctgatcatcctgcctctggcctttggcaagagacagggcagagaattcatctggaacgacctgctgtccctggaaaccggcagcctgaagctggccaacggaagagtgatcgagaagacactgtacaacagaagaacccggcaggatgagcctgccctgttcgtggccctgaccttcgagcggcgggaggtcctggactcctccaatatcaaaccaatgaacctgatcggcgtggcaagaggcgaaaacatccccgccgtgatcgccctgaccgaccccgagggctgcccactgagccggtttaaggatagcctgggaaacccaacccacatcctgagaatcggcgagagctataaggagaagcagcggaccatccaggccaagaaggaggtggagcagcggagagccggcggctacagccggaagtacgccagcaaagccaagaatctggcagacgatatggtgagaaacaccgctagagatctgctgtactacgccgtgacccaggatgccatgctgatcttcgccaacctgagccggggcttcggccggcagggcaagcggaccttcatggccgagagacagtacacacggatggaggactggctgaccgccaagctggcctacgagggcctgagcaagacctacctgtccaagacactggcccagtacacctccaagacatgcagcaactgtgggtttaccatcaccagcgccgactacgacagggtgctggagaagctgaagaagacagcaacaggctggatgaccacaattaacggcaaggagctgaaggtggagggccagattacctactacaacagatacaagagacagaacgtagtcaaggacctgtccgtcgagctggatagactgagcgaagaatctgtgaacaacgacatctcctcctggacaaagggcagaagcggagaagctctgagcctcctgaagaaaagattctcccatagacccgtgcaggagaagttcgtgtgcctgaactgcggcttcgagacacacgcagccgagcaagccgccctgaacatcgccagatcctggctgttcctgcggagccaggagtacaagaaataccagacaaacaagacaaccggcaacaccgataagagagccttcgtcgagacctggcagtccttttaccggaagaagcttaaggaggtgtggaaacctgccgtgcggtctggcggatctggcggaggctccttctacacctgtgaccttcgaggatgtggtggtctacttcaccgccgctgagtgggtgcacctgacaaactggcaaagagatttttatcaggccgtgatgatggaaacctacgagctggtggccagcgtggctggcgacggcgttccaatggccgaggacgaggaaggcggagtggaaagacccgtgtggcagtacatccccagaggcaagcggcggagaaagacccctcagcctcgcgccgacggatctggctccggcagcggccccaagaaaaagagaaaagtctaagctgccttctgcggggcttgccttctggccatgcccttcttctctcccttgcacctgtacctcttggtctttgaataaagcctgagtaggaaggctagcaaaaaaaaaaaaaaaaaaaaaaaaaaaaaaaaaaaaaaaaaaaaaaaaaaaaaaaaaaaaaaaaaaaaaaaaaaaaaaaa

SEQ ID NO: 18525 - RNA, 9494 nt, synthetic construct
  source 1..9494: mol_type = other RNA
aggaaataagagagaaaagaagagtaagaagaaatataagagccaccatggcccctaagaagaagcgtaaagtgagccggatggaacgcctcgtctacgaggtgcggcagaagtgcagaaacatcgaggacatctgcatctcctgcggatctctgaacgtgaccctggagcacccactgttcatcggcggcatgtgccagaactgtaaaaactgttttctggagtgtgcctatcaatacgacgatgacggctaccagagctactgcaccatctgttgcggcggaagagaggtgctgatgtgtggaaataacaactgctgccggtgcttctgcgtggaatgcgtggacctgctggtgggccccggcgccgcccaggccgctattaaggaagatccttggaactgctacatgtgcggccacaagggcacatacggcctgctgagacggagagaggactggcctagcagactgcagatgttcttcgccaataaccacgaccaggagttcgacccccctaaggtgtaccctcccgtccccgccgagaagagaaagcccatccgggtcctgagcctgttcgatggcatcgccaccggtctgctggtgctgaaggacctgggcatccaggtggataggtacattgcctccgaggtgtgcgaggactccatcaccgtgggaatggtgcgtcatcagggcaagatcatgtacgtgggcgacgtgcggagcgtgacacagaagcatatccaggagtggggccctttcgacctggtgatcggcggcagcccttgcaatgacctgagcatcgtgaacccagcccggaagggcctgtacgagggaaccggcagactgttcttcgagttttacagactgctgcacgacgcccggcctaaggaaggcgacgaccggcccttcttttggctgttcgagaatgtggtggccatgggagtcagcgacaagcgggatattagccggttcctggagagcaaccccgtgatgatcgatgccaaggaagtgagcgccgcccaccgggccagatacttctggggcaatctgcctggcatgaacagacccctggccagcaccgtgaacgacaagctggagctgcaggagtgcctggagcacggccggatcgccaagttcagcaaggtgagaaccatcaccacccgaagcaacagcatcaaacaaggcaaggaccagcactttcctgtgttcatgaacgagaaggaggacatcctgtggtgtaccgagatggagagagtgttcgggttcccagtccactacacagatgtcagcaacatgtctagactggccagacagagactgctgggaagaagctggtccgtccctgtgatcagacacctgttcgcccctctgaaggagtacttcgcctgcgtgagcagcggcaacagcaacgccaacagccggggccccagcttctctagcggcctggtgccactgtccctgagagggagccacatgggccccatggagatctacaaaaccgtgagcgcctggaagcggcagcctgtgcgcgtgctgagcctgtttcggaatatcgataaagtcctgaaaagcctgggattcctggagagcggctctggctccggcggtggcaccctgaagtacgtggaggatgtgacaaacgtggtcagacgggatgtggagaagtggggccccttcgatctggtgtacggcagcacccaacccctgggcagctcttgtgaccggtgccctggctggtacatgtttcagttccaccggatcctgcagtacgccctgccgagacaggagtcccagcggccattcttttggattttcatggacaacttgctgctgaccgaggatgaccaggaaactaccactcggttcctgcagaccgaagccgtgaccctgcaggacgtgagaggccgggactaccagaacgccatgcgggtgtggtccaacatccctggactgaaaagcaagcacgcacctctgacccctaaagaagaggagtacctgcaggcccaggtgcggagcagaagcaagctggacgcccctaaggtggatctgctggtgaagaattgcctcctgcccctgagagagtacttcaagtatttcagccagaatagtctgcccctgggaggcagcggcggcggcgccctggtgacatttgaggacgtcgccgtgcggttcacccaggaggaatgggctctgctggatccttctcagaaaatcctgtaccgggacgtgatgagagagacataccggaatctgacctccgtgggcatcaactgggaatgttgggaccttgaagcctgcttcagaagcctgggaagaaacctgagagtgcaggtggtgaagagaaagtgcgagctgaccaacagcggcccctgcgccgagggcggcccaagcagcggcgcccctcctcccagcggcggcagcccagccggctccccaacctctaccgaggagggcacctctgagtccgccacccccgagagcggccctggcacctccaccgagcccagcgagggcagcgcacccggcagccctgccggcagccccacctccacagaggagggaaccagcaccgagcccagcgaaggcagcgccccaggcaccagcaccgagcctagtgagcaggagattaaacggatcaacaagatcagaagaagacttgtgaaagacagcaacaccaagaaggccggcaagacaggccccatgaaaaccctgctggttagagtgatgacacccgatctgagagagcggctggaaaacctgagaaagaagcctgaaaatatcccccagcccatcagcaatacatctagagccaacctgaataagctgctgaccgattacaccgaaatgaagaaggcgatcctgcatgtgtactgggaagagttccagaaggaccctgtgggcctgatgagccgggtggcccagcctgccagcaagaagatcgatcagaacaagctgaaacctgagatggacgagaagggcaacctgaccaccgccggctttgcctgctctcagtgtggccagcccctgttcgtgtacaagctggagcaggtgtctgagaagggcaaggcttacaccaactacttcggacggtgcaatgtggccgagcacgaaaagctgatcctgctggcccagctgaagcccgagaaggatagcgacgaagccgtgacatatagcctgggaaagtttgggcagagggccctggatttctacagcattcatgtgaccaaggagtccacccaccccgtgaagcccctggcccagatcgccggaaacagatacgcctccggacctgtgggaaaggccctgagcgacgcatgtatgggcacaatcgcctccttcctgtctaagtaccaggacatcatcatcgaacaccagaaggtggtgaagggcaaccagaagagactggagagcctgcgggagctggccggcaaggaaaacctggaataccctagcgtgaccctgccacctcagcctcacaccaaggagggcgttgatgcctacaacgaagtgatcgcccgggtgcgaatgtgggtgaacctgaacctgtggcagaagctgaagctaagcagagatgatgccaagcctctgctgagactgaagggattcccttcctttcctctggtcgagagacaggccaacgaagtggactggtgggacatggtgtgtaacgtgaagaagctgatcaacgagaaaaaggaggatggcaaggtgttttggcagaatctggctggctacaagagacaggaagccctgagaccatacctgagcagcgaggaagatcggaagaagggaaagaaattcgctcggtaccagctgggcgacctgctgctgcacctggaaaagaagcacggcgaggactggggaaaggtgtacgacgaggcctgggagcggattgacaagaaagtggaaggcctgagcaagcacatcaagctggaagaggaacggagaagcgaggacgcccagagcaaggccgccctgaccgactggctgcgggctaaggccagcttcgtgatcgagggcctgaaggaggccgacaaggacgagttctgcagatgcgagctgaagctgcagaagtggtacggggacctgcggggaaagcccttcgccatcgaagccgagaacagcatcctggacatcagcggcttcagcaagcagtacaactgtgccttcatctggcagaaggacggcgtgaagaagctgaacctgtacctgatcatcaactacttcaagggcggcaagctgcggttcaagaagatcaaacctgaagccttcgaagccaacagattctacaccgtgatcaacaaaaagagcggcgagatcgtgcccatggaggtgaacttcaacttcgacgaccccaacctgatcatcctgcctctggcctttggcaagagacagggcagagaattcatctggaacgacctgctgtccctggaaaccggcagcctgaagctggccaacggaagagtgatcgagaagacactgtacaacagaagaacccggcaggatgagcctgccctgttcgtggccctgaccttcgagcggcgggaggtcctggactcctccaatatcaaaccaatgaacctgatcggcgtggcaagaggcgaaaacatccccgccgtgatcgccctgaccgaccccgagggctgcccactgagccggtttaaggatagcctgggaaacccaacccacatcctgagaatcggcgagagctataaggagaagcagcggaccatccaggccaagaaggaggtggagcagcggagagccggcggctacagccggaagtacgccagcaaagccaagaatctggcagacgatatggtgagaaacaccgctagagatctgctgtactacgccgtgacccaggatgccatgctgatcttcgccaacctgagccggggcttcggccggcagggcaagcggaccttcatggccgagagacagtacacacggatggaggactggctgaccgccaagctggcctacgagggcctgagcaagacctacctgtccaagacactggcccagtacacctccaagacatgcagcaactgtgggtttaccatcaccagcgccgactacgacagggtgctggagaagctgaagaagacagcaacaggctggatgaccacaattaacggcaaggagctgaaggtggagggccagattacctactacaacagatacaagagacagaacgtagtcaaggacctgtccgtcgagctggatagactgagcgaagaatctgtgaacaacgacatctcctcctggacaaagggcagaagcggagaagctctgagcctcctgaagaaaagattctcccatagacccgtgcaggagaagttcgtgtgcctgaactgcggcttcgagacacacgcagccgagcaagccgccctgaacatcgccagatcctggctgttcctgcggagccaggagtacaagaaataccagacaaacaagacaaccggcaacaccgataagagagccttcgtcgagacctggcagtccttttaccggaagaagcttaaggaggtgtggaaacctgccgtgcggtctggcggatctggcggaggctccgtgacctacaacgacgtgcacgtggacatcacccaggaggaatgggctctgatggaccccagccagcggaacctgtacaaggatgtgatggtcgagacatacatgaacctgaccgccatcggatataattgggagaacctggaagtggaagaaccatgtcagaaccccctgaagcacggcagacacgagagacctcatacaggcgagaaaccttacgagtacaatcagtgcggcaaggccttcgcccaacctggcggcccaagcagcggcgcccctcctcccagcggcggcagcccagccggctccccaacctctaccgaggagggcacctctgagtccgccacccccgagagcggccctggcacctccaccgagcccagcgagggcagcgcacccggcagccctgccggcagccccacctccacagaggagggaaccagcaccgagcccagcgaaggcagcgccccaggcaccagcaccgagcctagtgagcaggagattaaacggatcaacaagatcagaagaagacttgtgaaagacagcaacaccaagaaggccggcaagacaggccccatgaaaaccctgctggttagagtgatgacacccgatctgagagagcggctggaaaacctgagaaagaagcctgaaaatatcccccagcccatcagcaatacatctagagccaacctgaataagctgctgaccgattacaccgaaatgaagaaggcgatcctgcatgtgtactgggaagagttccagaaggaccctgtgggcctgatgagccgggtggcccagcctgccagcaagaagatcgatcagaacaagctgaaacctgagatggacgagaagggcaacctgaccaccgccggctttgcctgctctcagtgtggccagcccctgttcgtgtacaagctggagcaggtgtctgagaagggcaaggcttacaccaactacttcggacggtgcaatgtggccgagcacgaaaagctgatcctgctggcccagctgaagcccgagaaggatagcgacgaagccgtgacatatagcctgggaaagtttgggcagagggccctggatttctacagcattcatgtgaccaaggagtccacccaccccgtgaagcccctggcccagatcgccggaaacagatacgcctccggacctgtgggaaaggccctgagcgacgcatgtatgggcacaatcgcctccttcctgtctaagtaccaggacatcatcatcgaacaccagaaggtggtgaagggcaaccagaagagactggagagcctgcgggagctggccggcaaggaaaacctggaataccctagcgtgaccctgccacctcagcctcacaccaaggagggcgttgatgcctacaacgaagtgatcgcccgggtgcgaatgtgggtgaacctgaacctgtggcagaagctgaagctaagcagagatgatgccaagcctctgctgagactgaagggattcccttcctttcctctggtcgagagacaggccaacgaagtggactggtgggacatggtgtgtaacgtgaagaagctgatcaacgagaaaaaggaggatggcaaggtgttttggcagaatctggctggctacaagagacaggaagccctgagaccatacctgagcagcgaggaagatcggaagaagggaaagaaattcgctcggtaccagctgggcgacctgctgctgcacctggaaaagaagcacggcgaggactggggaaaggtgtacgacgaggcctgggagcggattgacaagaaagtggaaggcctgagcaagcacatcaagctggaagaggaacggagaagcgaggacgcccagagcaaggccgccctgaccgactggctgcgggctaaggccagcttcgtgatcgagggcctgaaggaggccgacaaggacgagttctgcagatgcgagctgaagctgcagaagtggtacggggacctgcggggaaagcccttcgccatcgaagccgagaacagcatcctggacatcagcggcttcagcaagcagtacaactgtgccttcatctggcagaaggacggcgtgaagaagctgaacctgtacctgatcatcaactacttcaagggcggcaagctgcggttcaagaagatcaaacctgaagccttcgaagccaacagattctacaccgtgatcaacaaaaagagcggcgagatcgtgcccatggaggtgaacttcaacttcgacgaccccaacctgatcatcctgcctctggcctttggcaagagacagggcagagaattcatctggaacgacctgctgtccctggaaaccggcagcctgaagctggccaacggaagagtgatcgagaagacactgtacaacagaagaacccggcaggatgagcctgccctgttcgtggccctgaccttcgagcggcgggaggtcctggactcctccaatatcaaaccaatgaacctgatcggcgtggcaagaggcgaaaacatccccgccgtgatcgccctgaccgaccccgagggctgcccactgagccggtttaaggatagcctgggaaacccaacccacatcctgagaatcggcgagagctataaggagaagcagcggaccatccaggccaagaaggaggtggagcagcggagagccggcggctacagccggaagtacgccagcaaagccaagaatctggcagacgatatggtgagaaacaccgctagagatctgctgtactacgccgtgacccaggatgccatgctgatcttcgccaacctgagccggggcttcggccggcagggcaagcggaccttcatggccgagagacagtacacacggatggaggactggctgaccgccaagctggcctacgagggcctgagcaagacctacctgtccaagacactggcccagtacacctccaagacatgcagcaactgtgggtttaccatcaccagcgccgactacgacagggtgctggagaagctgaagaagacagcaacaggctggatgaccacaattaacggcaaggagctgaaggtggagggccagattacctactacaacagatacaagagacagaacgtagtcaaggacctgtccgtcgagctggatagactgagcgaagaatctgtgaacaacgacatctcctcctggacaaagggcagaagcggagaagctctgagcctcctgaagaaaagattctcccatagacccgtgcaggagaagttcgtgtgcctgaactgcggcttcgagacacacgcagccgagcaagccgccctgaacatcgccagatcctggctgttcctgcggagccaggagtacaagaaataccagacaaacaagacaaccggcaacaccgataagagagccttcgtcgagacctggcagtccttttaccggaagaagcttaaggaggtgtggaaacctgccgtgcggtctggcggatctggcggaggctcctcaggacgtggtgacattcaaggacgtcgccatctacttcagccctgaggaatgggtgcggctgagcgccggacagagagaactgtaccaggaggtgatgctggacaactacgagctggtgaccagcctggatagagagagcaaactgctgtataagatggaccccgaggaagaaagctgcgagggcgtgccatacagctctgccgacagcggcgcccctgatagctcctccacctctgcttgtggatctggctccggcagcggccccaagaaaaagagaaaagtctaagctgccttctgcggggcttgccttctggccatgcccttcttctctcccttgcacctgtacctcttggtctttgaataaagcctgagtaggaaggctagcaaaaaaaaaaaaaaaaaaaaaaaaaaaaaaaaaaaaaaaaaaaaaaaaaaaaaaaaaaaaaaaaaaaaaaaaaaaaaaaa

SEQ ID NO: 18526 - RNA, 9521 nt, synthetic construct
  source 1..9521: mol_type = other RNA
aggaaataagagagaaaagaagagtaagaagaaatataagagccaccatggcccctaagaagaagcgtaaagtgagccggatggaacgcctcgtctacgaggtgcggcagaagtgcagaaacatcgaggacatctgcatctcctgcggatctctgaacgtgaccctggagcacccactgttcatcggcggcatgtgccagaactgtaaaaactgttttctggagtgtgcctatcaatacgacgatgacggctaccagagctactgcaccatctgttgcggcggaagagaggtgctgatgtgtggaaataacaactgctgccggtgcttctgcgtggaatgcgtggacctgctggtgggccccggcgccgcccaggccgctattaaggaagatccttggaactgctacatgtgcggccacaagggcacatacggcctgctgagacggagagaggactggcctagcagactgcagatgttcttcgccaataaccacgaccaggagttcgacccccctaaggtgtaccctcccgtccccgccgagaagagaaagcccatccgggtcctgagcctgttcgatggcatcgccaccggtctgctggtgctgaaggacctgggcatccaggtggataggtacattgcctccgaggtgtgcgaggactccatcaccgtgggaatggtgcgtcatcagggcaagatcatgtacgtgggcgacgtgcggagcgtgacacagaagcatatccaggagtggggccctttcgacctggtgatcggcggcagcccttgcaatgacctgagcatcgtgaacccagcccggaagggcctgtacgagggaaccggcagactgttcttcgagttttacagactgctgcacgacgcccggcctaaggaaggcgacgaccggcccttcttttggctgttcgagaatgtggtggccatgggagtcagcgacaagcgggatattagccggttcctggagagcaaccccgtgatgatcgatgccaaggaagtgagcgccgcccaccgggccagatacttctggggcaatctgcctggcatgaacagacccctggccagcaccgtgaacgacaagctggagctgcaggagtgcctggagcacggccggatcgccaagttcagcaaggtgagaaccatcaccacccgaagcaacagcatcaaacaaggcaaggaccagcactttcctgtgttcatgaacgagaaggaggacatcctgtggtgtaccgagatggagagagtgttcgggttcccagtccactacacagatgtcagcaacatgtctagactggccagacagagactgctgggaagaagctggtccgtccctgtgatcagacacctgttcgcccctctgaaggagtacttcgcctgcgtgagcagcggcaacagcaacgccaacagccggggccccagcttctctagcggcctggtgccactgtccctgagagggagccacatgggccccatggagatctacaaaaccgtgagcgcctggaagcggcagcctgtgcgcgtgctgagcctgtttcggaatatcgataaagtcctgaaaagcctgggattcctggagagcggctctggctccggcggtggcaccctgaagtacgtggaggatgtgacaaacgtggtcagacgggatgtggagaagtggggccccttcgatctggtgtacggcagcacccaacccctgggcagctcttgtgaccggtgccctggctggtacatgtttcagttccaccggatcctgcagtacgccctgccgagacaggagtcccagcggccattcttttggattttcatggacaacttgctgctgaccgaggatgaccaggaaactaccactcggttcctgcagaccgaagccgtgaccctgcaggacgtgagaggccgggactaccagaacgccatgcgggtgtggtccaacatccctggactgaaaagcaagcacgcacctctgacccctaaagaagaggagtacctgcaggcccaggtgcggagcagaagcaagctggacgcccctaaggtggatctgctggtgaagaattgcctcctgcccctgagagagtacttcaagtatttcagccagaatagtctgcccctgggaggcagcggcggcggcgccctggtgacatttgaggacgtcgccgtgcggttcacccaggaggaatgggctctgctggatccttctcagaaaatcctgtaccgggacgtgatgagagagacataccggaatctgacctccgtgggcatcaactgggaatgttgggaccttgaagcctgcttcagaagcctgggaagaaacctgagagtgcaggtggtgaagagaaagtgcgagctgaccaacagcggcccctgcgccgagggcggcccaagcagcggcgcccctcctcccagcggcggcagcccagccggctccccaacctctaccgaggagggcacctctgagtccgccacccccgagagcggccctggcacctccaccgagcccagcgagggcagcgcacccggcagccctgccggcagccccacctccacagaggagggaaccagcaccgagcccagcgaaggcagcgccccaggcaccagcaccgagcctagtgagcaggagattaaacggatcaacaagatcagaagaagacttgtgaaagacagcaacaccaagaaggccggcaagacaggccccatgaaaaccctgctggttagagtgatgacacccgatctgagagagcggctggaaaacctgagaaagaagcctgaaaatatcccccagcccatcagcaatacatctagagccaacctgaataagctgctgaccgattacaccgaaatgaagaaggcgatcctgcatgtgtactgggaagagttccagaaggaccctgtgggcctgatgagccgggtggcccagcctgccagcaagaagatcgatcagaacaagctgaaacctgagatggacgagaagggcaacctgaccaccgccggctttgcctgctctcagtgtggccagcccctgttcgtgtacaagctggagcaggtgtctgagaagggcaaggcttacaccaactacttcggacggtgcaatgtggccgagcacgaaaagctgatcctgctggcccagctgaagcccgagaaggatagcgacgaagccgtgacatatagcctgggaaagtttgggcagagggccctggatttctacagcattcatgtgaccaaggagtccacccaccccgtgaagcccctggcccagatcgccggaaacagatacgcctccggacctgtgggaaaggccctgagcgacgcatgtatgggcacaatcgcctccttcctgtctaagtaccaggacatcatcatcgaacaccagaaggtggtgaagggcaaccagaagagactggagagcctgcgggagctggccggcaaggaaaacctggaataccctagcgtgaccctgccacctcagcctcacaccaaggagggcgttgatgcctacaacgaagtgatcgcccgggtgcgaatgtgggtgaacctgaacctgtggcagaagctgaagctaagcagagatgatgccaagcctctgctgagactgaagggattcccttcctttcctctggtcgagagacaggccaacgaagtggactggtgggacatggtgtgtaacgtgaagaagctgatcaacgagaaaaaggaggatggcaaggtgttttggcagaatctggctggctacaagagacaggaagccctgagaccatacctgagcagcgaggaagatcggaagaagggaaagaaattcgctcggtaccagctgggcgacctgctgctgcacctggaaaagaagcacggcgaggactggggaaaggtgtacgacgaggcctgggagcggattgacaagaaagtggaaggcctgagcaagcacatcaagctggaagaggaacggagaagcgaggacgcccagagcaaggccgccctgaccgactggctgcgggctaaggccagcttcgtgatcgagggcctgaaggaggccgacaaggacgagttctgcagatgcgagctgaagctgcagaagtggtacggggacctgcggggaaagcccttcgccatcgaagccgagaacagcatcctggacatcagcggcttcagcaagcagtacaactgtgccttcatctggcagaaggacggcgtgaagaagctgaacctgtacctgatcatcaactacttcaagggcggcaagctgcggttcaagaagatcaaacctgaagccttcgaagccaacagattctacaccgtgatcaacaaaaagagcggcgagatcgtgcccatggaggtgaacttcaacttcgacgaccccaacctgatcatcctgcctctggcctttggcaagagacagggcagagaattcatctggaacgacctgctgtccctggaaaccggcagcctgaagctggccaacggaagagtgatcgagaagacactgtacaacagaagaacccggcaggatgagcctgccctgttcgtggccctgaccttcgagcggcgggaggtcctggactcctccaatatcaaaccaatgaacctgatcggcgtggcaagaggcgaaaacatccccgccgtgatcgccctgaccgaccccgagggctgcccactgagccggtttaaggatagcctgggaaacccaacccacatcctgagaatcggcgagagctataaggagaagcagcggaccatccaggccaagaaggaggtggagcagcggagagccggcggctacagccggaagtacgccagcaaagccaagaatctggcagacgatatggtgagaaacaccgctagagatctgctgtactacgccgtgacccaggatgccatgctgatcttcgccaacctgagccggggcttcggccggcagggcaagcggaccttcatggccgagagacagtacacacggatggaggactggctgaccgccaagctggcctacgagggcctgagcaagacctacctgtccaagacactggcccagtacacctccaagacatgcagcaactgtgggtttaccatcaccagcgccgactacgacagggtgctggagaagctgaagaagacagcaacaggctggatgaccacaattaacggcaaggagctgaaggtggagggccagattacctactacaacagatacaagagacagaacgtagtcaaggacctgtccgtcgagctggatagactgagcgaagaatctgtgaacaacgacatctcctcctggacaaagggcagaagcggagaagctctgagcctcctgaagaaaagattctcccatagacccgtgcaggagaagttcgtgtgcctgaactgcggcttcgagacacacgcagccgagcaagccgccctgaacatcgccagatcctggctgttcctgcggagccaggagtacaagaaataccagacaaacaagacaaccggcaacaccgataagagagccttcgtcgagacctggcagtccttttaccggaagaagcttaaggaggtgtggaaacctgccgtgcggtctggcggatctggcggaggctccgtgacctacaacgacgtgcacgtggacatcacccaggaggaatgggctctgatggaccccagccagcggaacctgtacaaggatgtgatggtcgagacatacatgaacctgaccgccatcggatataattgggagaacctggaagtggaagaaccatgtcagaaccccctgaagcacggcagacacgagagacctcatacaggcgagaaaccttacgagtacaatcagtgcggcaaggccttcgcccaacctggcggcccaagcagcggcgcccctcctcccagcggcggcagcccagccggctccccaacctctaccgaggagggcacctctgagtccgccacccccgagagcggccctggcacctccaccgagcccagcgagggcagcgcacccggcagccctgccggcagccccacctccacagaggagggaaccagcaccgagcccagcgaaggcagcgccccaggcaccagcaccgagcctagtgagcaggagattaaacggatcaacaagatcagaagaagacttgtgaaagacagcaacaccaagaaggccggcaagacaggccccatgaaaaccctgctggttagagtgatgacacccgatctgagagagcggctggaaaacctgagaaagaagcctgaaaatatcccccagcccatcagcaatacatctagagccaacctgaataagctgctgaccgattacaccgaaatgaagaaggcgatcctgcatgtgtactgggaagagttccagaaggaccctgtgggcctgatgagccgggtggcccagcctgccagcaagaagatcgatcagaacaagctgaaacctgagatggacgagaagggcaacctgaccaccgccggctttgcctgctctcagtgtggccagcccctgttcgtgtacaagctggagcaggtgtctgagaagggcaaggcttacaccaactacttcggacggtgcaatgtggccgagcacgaaaagctgatcctgctggcccagctgaagcccgagaaggatagcgacgaagccgtgacatatagcctgggaaagtttgggcagagggccctggatttctacagcattcatgtgaccaaggagtccacccaccccgtgaagcccctggcccagatcgccggaaacagatacgcctccggacctgtgggaaaggccctgagcgacgcatgtatgggcacaatcgcctccttcctgtctaagtaccaggacatcatcatcgaacaccagaaggtggtgaagggcaaccagaagagactggagagcctgcgggagctggccggcaaggaaaacctggaataccctagcgtgaccctgccacctcagcctcacaccaaggagggcgttgatgcctacaacgaagtgatcgcccgggtgcgaatgtgggtgaacctgaacctgtggcagaagctgaagctaagcagagatgatgccaagcctctgctgagactgaagggattcccttcctttcctctggtcgagagacaggccaacgaagtggactggtgggacatggtgtgtaacgtgaagaagctgatcaacgagaaaaaggaggatggcaaggtgttttggcagaatctggctggctacaagagacaggaagccctgagaccatacctgagcagcgaggaagatcggaagaagggaaagaaattcgctcggtaccagctgggcgacctgctgctgcacctggaaaagaagcacggcgaggactggggaaaggtgtacgacgaggcctgggagcggattgacaagaaagtggaaggcctgagcaagcacatcaagctggaagaggaacggagaagcgaggacgcccagagcaaggccgccctgaccgactggctgcgggctaaggccagcttcgtgatcgagggcctgaaggaggccgacaaggacgagttctgcagatgcgagctgaagctgcagaagtggtacggggacctgcggggaaagcccttcgccatcgaagccgagaacagcatcctggacatcagcggcttcagcaagcagtacaactgtgccttcatctggcagaaggacggcgtgaagaagctgaacctgtacctgatcatcaactacttcaagggcggcaagctgcggttcaagaagatcaaacctgaagccttcgaagccaacagattctacaccgtgatcaacaaaaagagcggcgagatcgtgcccatggaggtgaacttcaacttcgacgaccccaacctgatcatcctgcctctggcctttggcaagagacagggcagagaattcatctggaacgacctgctgtccctggaaaccggcagcctgaagctggccaacggaagagtgatcgagaagacactgtacaacagaagaacccggcaggatgagcctgccctgttcgtggccctgaccttcgagcggcgggaggtcctggactcctccaatatcaaaccaatgaacctgatcggcgtggcaagaggcgaaaacatccccgccgtgatcgccctgaccgaccccgagggctgcccactgagccggtttaaggatagcctgggaaacccaacccacatcctgagaatcggcgagagctataaggagaagcagcggaccatccaggccaagaaggaggtggagcagcggagagccggcggctacagccggaagtacgccagcaaagccaagaatctggcagacgatatggtgagaaacaccgctagagatctgctgtactacgccgtgacccaggatgccatgctgatcttcgccaacctgagccggggcttcggccggcagggcaagcggaccttcatggccgagagacagtacacacggatggaggactggctgaccgccaagctggcctacgagggcctgagcaagacctacctgtccaagacactggcccagtacacctccaagacatgcagcaactgtgggtttaccatcaccagcgccgactacgacagggtgctggagaagctgaagaagacagcaacaggctggatgaccacaattaacggcaaggagctgaaggtggagggccagattacctactacaacagatacaagagacagaacgtagtcaaggacctgtccgtcgagctggatagactgagcgaagaatctgtgaacaacgacatctcctcctggacaaagggcagaagcggagaagctctgagcctcctgaagaaaagattctcccatagacccgtgcaggagaagttcgtgtgcctgaactgcggcttcgagacacacgcagccgagcaagccgccctgaacatcgccagatcctggctgttcctgcggagccaggagtacaagaaataccagacaaacaagacaaccggcaacaccgataagagagccttcgtcgagacctggcagtccttttaccggaagaagcttaaggaggtgtggaaacctgccgtgcggtctggcggatctggcggaggctcctgtcgccttccgggacgtgatcgtggacttcacccaggaggaatggcagcagctgaagcctgctcaaaaggacctgtacagagatgtgatgatggaaatctactggaatctggtgtctctggacctggaaaccgagggagatatgaacgagcctgaccccgagaaagacagctgggaggatagaacaagcatcgtggttgtggaaggcctgatgcggaacggcgcccagggctacgcctgcgagaaggccggcatccagggctgtagagtgggatctggctccggcagcggccccaagaaaaagagaaaagtctaagctgccttctgcggggcttgccttctggccatgcccttcttctctcccttgcacctgtacctcttggtctttgaataaagcctgagtaggaaggctagcaaaaaaaaaaaaaaaaaaaaaaaaaaaaaaaaaaaaaaaaaaaaaaaaaaaaaaaaaaaaaaaaaaaaaaaaaaaaaaaa

SEQ ID NO: 18527 - RNA, 9494 nt, synthetic construct
  source 1..9494: mol_type = other RNA
aggaaataagagagaaaagaagagtaagaagaaatataagagccaccatggcccctaagaagaagcgtaaagtgagccggatggaacgcctcgtctacgaggtgcggcagaagtgcagaaacatcgaggacatctgcatctcctgcggatctctgaacgtgaccctggagcacccactgttcatcggcggcatgtgccagaactgtaaaaactgttttctggagtgtgcctatcaatacgacgatgacggctaccagagctactgcaccatctgttgcggcggaagagaggtgctgatgtgtggaaataacaactgctgccggtgcttctgcgtggaatgcgtggacctgctggtgggccccggcgccgcccaggccgctattaaggaagatccttggaactgctacatgtgcggccacaagggcacatacggcctgctgagacggagagaggactggcctagcagactgcagatgttcttcgccaataaccacgaccaggagttcgacccccctaaggtgtaccctcccgtccccgccgagaagagaaagcccatccgggtcctgagcctgttcgatggcatcgccaccggtctgctggtgctgaaggacctgggcatccaggtggataggtacattgcctccgaggtgtgcgaggactccatcaccgtgggaatggtgcgtcatcagggcaagatcatgtacgtgggcgacgtgcggagcgtgacacagaagcatatccaggagtggggccctttcgacctggtgatcggcggcagcccttgcaatgacctgagcatcgtgaacccagcccggaagggcctgtacgagggaaccggcagactgttcttcgagttttacagactgctgcacgacgcccggcctaaggaaggcgacgaccggcccttcttttggctgttcgagaatgtggtggccatgggagtcagcgacaagcgggatattagccggttcctggagagcaaccccgtgatgatcgatgccaaggaagtgagcgccgcccaccgggccagatacttctggggcaatctgcctggcatgaacagacccctggccagcaccgtgaacgacaagctggagctgcaggagtgcctggagcacggccggatcgccaagttcagcaaggtgagaaccatcaccacccgaagcaacagcatcaaacaaggcaaggaccagcactttcctgtgttcatgaacgagaaggaggacatcctgtggtgtaccgagatggagagagtgttcgggttcccagtccactacacagatgtcagcaacatgtctagactggccagacagagactgctgggaagaagctggtccgtccctgtgatcagacacctgttcgcccctctgaaggagtacttcgcctgcgtgagcagcggcaacagcaacgccaacagccggggccccagcttctctagcggcctggtgccactgtccctgagagggagccacatgggccccatggagatctacaaaaccgtgagcgcctggaagcggcagcctgtgcgcgtgctgagcctgtttcggaatatcgataaagtcctgaaaagcctgggattcctggagagcggctctggctccggcggtggcaccctgaagtacgtggaggatgtgacaaacgtggtcagacgggatgtggagaagtggggccccttcgatctggtgtacggcagcacccaacccctgggcagctcttgtgaccggtgccctggctggtacatgtttcagttccaccggatcctgcagtacgccctgccgagacaggagtcccagcggccattcttttggattttcatggacaacttgctgctgaccgaggatgaccaggaaactaccactcggttcctgcagaccgaagccgtgaccctgcaggacgtgagaggccgggactaccagaacgccatgcgggtgtggtccaacatccctggactgaaaagcaagcacgcacctctgacccctaaagaagaggagtacctgcaggcccaggtgcggagcagaagcaagctggacgcccctaaggtggatctgctggtgaagaattgcctcctgcccctgagagagtacttcaagtatttcagccagaatagtctgcccctgggaggcagcggcggcggcgccctggtgacatttgaggacgtcgccgtgcggttcacccaggaggaatgggctctgctggatccttctcagaaaatcctgtaccgggacgtgatgagagagacataccggaatctgacctccgtgggcatcaactgggaatgttgggaccttgaagcctgcttcagaagcctgggaagaaacctgagagtgcaggtggtgaagagaaagtgcgagctgaccaacagcggcccctgcgccgagggcggcccaagcagcggcgcccctcctcccagcggcggcagcccagccggctccccaacctctaccgaggagggcacctctgagtccgccacccccgagagcggccctggcacctccaccgagcccagcgagggcagcgcacccggcagccctgccggcagccccacctccacagaggagggaaccagcaccgagcccagcgaaggcagcgccccaggcaccagcaccgagcctagtgagcaggagattaaacggatcaacaagatcagaagaagacttgtgaaagacagcaacaccaagaaggccggcaagacaggccccatgaaaaccctgctggttagagtgatgacacccgatctgagagagcggctggaaaacctgagaaagaagcctgaaaatatcccccagcccatcagcaatacatctagagccaacctgaataagctgctgaccgattacaccgaaatgaagaaggcgatcctgcatgtgtactgggaagagttccagaaggaccctgtgggcctgatgagccgggtggcccagcctgccagcaagaagatcgatcagaacaagctgaaacctgagatggacgagaagggcaacctgaccaccgccggctttgcctgctctcagtgtggccagcccctgttcgtgtacaagctggagcaggtgtctgagaagggcaaggcttacaccaactacttcggacggtgcaatgtggccgagcacgaaaagctgatcctgctggcccagctgaagcccgagaaggatagcgacgaagccgtgacatatagcctgggaaagtttgggcagagggccctggatttctacagcattcatgtgaccaaggagtccacccaccccgtgaagcccctggcccagatcgccggaaacagatacgcctccggacctgtgggaaaggccctgagcgacgcatgtatgggcacaatcgcctccttcctgtctaagtaccaggacatcatcatcgaacaccagaaggtggtgaagggcaaccagaagagactggagagcctgcgggagctggccggcaaggaaaacctggaataccctagcgtgaccctgccacctcagcctcacaccaaggagggcgttgatgcctacaacgaagtgatcgcccgggtgcgaatgtgggtgaacctgaacctgtggcagaagctgaagctaagcagagatgatgccaagcctctgctgagactgaagggattcccttcctttcctctggtcgagagacaggccaacgaagtggactggtgggacatggtgtgtaacgtgaagaagctgatcaacgagaaaaaggaggatggcaaggtgttttggcagaatctggctggctacaagagacaggaagccctgagaccatacctgagcagcgaggaagatcggaagaagggaaagaaattcgctcggtaccagctgggcgacctgctgctgcacctggaaaagaagcacggcgaggactggggaaaggtgtacgacgaggcctgggagcggattgacaagaaagtggaaggcctgagcaagcacatcaagctggaagaggaacggagaagcgaggacgcccagagcaaggccgccctgaccgactggctgcgggctaaggccagcttcgtgatcgagggcctgaaggaggccgacaaggacgagttctgcagatgcgagctgaagctgcagaagtggtacggggacctgcggggaaagcccttcgccatcgaagccgagaacagcatcctggacatcagcggcttcagcaagcagtacaactgtgccttcatctggcagaaggacggcgtgaagaagctgaacctgtacctgatcatcaactacttcaagggcggcaagctgcggttcaagaagatcaaacctgaagccttcgaagccaacagattctacaccgtgatcaacaaaaagagcggcgagatcgtgcccatggaggtgaacttcaacttcgacgaccccaacctgatcatcctgcctctggcctttggcaagagacagggcagagaattcatctggaacgacctgctgtccctggaaaccggcagcctgaagctggccaacggaagagtgatcgagaagacactgtacaacagaagaacccggcaggatgagcctgccctgttcgtggccctgaccttcgagcggcgggaggtcctggactcctccaatatcaaaccaatgaacctgatcggcgtggcaagaggcgaaaacatccccgccgtgatcgccctgaccgaccccgagggctgcccactgagccggtttaaggatagcctgggaaacccaacccacatcctgagaatcggcgagagctataaggagaagcagcggaccatccaggccaagaaggaggtggagcagcggagagccggcggctacagccggaagtacgccagcaaagccaagaatctggcagacgatatggtgagaaacaccgctagagatctgctgtactacgccgtgacccaggatgccatgctgatcttcgccaacctgagccggggcttcggccggcagggcaagcggaccttcatggccgagagacagtacacacggatggaggactggctgaccgccaagctggcctacgagggcctgagcaagacctacctgtccaagacactggcccagtacacctccaagacatgcagcaactgtgggtttaccatcaccagcgccgactacgacagggtgctggagaagctgaagaagacagcaacaggctggatgaccacaattaacggcaaggagctgaaggtggagggccagattacctactacaacagatacaagagacagaacgtagtcaaggacctgtccgtcgagctggatagactgagcgaagaatctgtgaacaacgacatctcctcctggacaaagggcagaagcggagaagctctgagcctcctgaagaaaagattctcccatagacccgtgcaggagaagttcgtgtgcctgaactgcggcttcgagacacacgcagccgagcaagccgccctgaacatcgccagatcctggctgttcctgcggagccaggagtacaagaaataccagacaaacaagacaaccggcaacaccgataagagagccttcgtcgagacctggcagtccttttaccggaagaagcttaaggaggtgtggaaacctgccgtgcggtctggcggatctggcggaggctccgtgacctacaacgacgtgcacgtggacatcacccaggaggaatgggctctgatggaccccagccagcggaacctgtacaaggatgtgatggtcgagacatacatgaacctgaccgccatcggatataattgggagaacctggaagtggaagaaccatgtcagaaccccctgaagcacggcagacacgagagacctcatacaggcgagaaaccttacgagtacaatcagtgcggcaaggccttcgcccaacctggcggcccaagcagcggcgcccctcctcccagcggcggcagcccagccggctccccaacctctaccgaggagggcacctctgagtccgccacccccgagagcggccctggcacctccaccgagcccagcgagggcagcgcacccggcagccctgccggcagccccacctccacagaggagggaaccagcaccgagcccagcgaaggcagcgccccaggcaccagcaccgagcctagtgagcaggagattaaacggatcaacaagatcagaagaagacttgtgaaagacagcaacaccaagaaggccggcaagacaggccccatgaaaaccctgctggttagagtgatgacacccgatctgagagagcggctggaaaacctgagaaagaagcctgaaaatatcccccagcccatcagcaatacatctagagccaacctgaataagctgctgaccgattacaccgaaatgaagaaggcgatcctgcatgtgtactgggaagagttccagaaggaccctgtgggcctgatgagccgggtggcccagcctgccagcaagaagatcgatcagaacaagctgaaacctgagatggacgagaagggcaacctgaccaccgccggctttgcctgctctcagtgtggccagcccctgttcgtgtacaagctggagcaggtgtctgagaagggcaaggcttacaccaactacttcggacggtgcaatgtggccgagcacgaaaagctgatcctgctggcccagctgaagcccgagaaggatagcgacgaagccgtgacatatagcctgggaaagtttgggcagagggccctggatttctacagcattcatgtgaccaaggagtccacccaccccgtgaagcccctggcccagatcgccggaaacagatacgcctccggacctgtgggaaaggccctgagcgacgcatgtatgggcacaatcgcctccttcctgtctaagtaccaggacatcatcatcgaacaccagaaggtggtgaagggcaaccagaagagactggagagcctgcgggagctggccggcaaggaaaacctggaataccctagcgtgaccctgccacctcagcctcacaccaaggagggcgttgatgcctacaacgaagtgatcgcccgggtgcgaatgtgggtgaacctgaacctgtggcagaagctgaagctaagcagagatgatgccaagcctctgctgagactgaagggattcccttcctttcctctggtcgagagacaggccaacgaagtggactggtgggacatggtgtgtaacgtgaagaagctgatcaacgagaaaaaggaggatggcaaggtgttttggcagaatctggctggctacaagagacaggaagccctgagaccatacctgagcagcgaggaagatcggaagaagggaaagaaattcgctcggtaccagctgggcgacctgctgctgcacctggaaaagaagcacggcgaggactggggaaaggtgtacgacgaggcctgggagcggattgacaagaaagtggaaggcctgagcaagcacatcaagctggaagaggaacggagaagcgaggacgcccagagcaaggccgccctgaccgactggctgcgggctaaggccagcttcgtgatcgagggcctgaaggaggccgacaaggacgagttctgcagatgcgagctgaagctgcagaagtggtacggggacctgcggggaaagcccttcgccatcgaagccgagaacagcatcctggacatcagcggcttcagcaagcagtacaactgtgccttcatctggcagaaggacggcgtgaagaagctgaacctgtacctgatcatcaactacttcaagggcggcaagctgcggttcaagaagatcaaacctgaagccttcgaagccaacagattctacaccgtgatcaacaaaaagagcggcgagatcgtgcccatggaggtgaacttcaacttcgacgaccccaacctgatcatcctgcctctggcctttggcaagagacagggcagagaattcatctggaacgacctgctgtccctggaaaccggcagcctgaagctggccaacggaagagtgatcgagaagacactgtacaacagaagaacccggcaggatgagcctgccctgttcgtggccctgaccttcgagcggcgggaggtcctggactcctccaatatcaaaccaatgaacctgatcggcgtggcaagaggcgaaaacatccccgccgtgatcgccctgaccgaccccgagggctgcccactgagccggtttaaggatagcctgggaaacccaacccacatcctgagaatcggcgagagctataaggagaagcagcggaccatccaggccaagaaggaggtggagcagcggagagccggcggctacagccggaagtacgccagcaaagccaagaatctggcagacgatatggtgagaaacaccgctagagatctgctgtactacgccgtgacccaggatgccatgctgatcttcgccaacctgagccggggcttcggccggcagggcaagcggaccttcatggccgagagacagtacacacggatggaggactggctgaccgccaagctggcctacgagggcctgagcaagacctacctgtccaagacactggcccagtacacctccaagacatgcagcaactgtgggtttaccatcaccagcgccgactacgacagggtgctggagaagctgaagaagacagcaacaggctggatgaccacaattaacggcaaggagctgaaggtggagggccagattacctactacaacagatacaagagacagaacgtagtcaaggacctgtccgtcgagctggatagactgagcgaagaatctgtgaacaacgacatctcctcctggacaaagggcagaagcggagaagctctgagcctcctgaagaaaagattctcccatagacccgtgcaggagaagttcgtgtgcctgaactgcggcttcgagacacacgcagccgagcaagccgccctgaacatcgccagatcctggctgttcctgcggagccaggagtacaagaaataccagacaaacaagacaaccggcaacaccgataagagagccttcgtcgagacctggcagtccttttaccggaagaagcttaaggaggtgtggaaacctgccgtgcggtctggcggatctggcggaggctccttctcaggagagcgtggccttcgaggacgtggccgtctacttcaccaccaaagagtgggccatcatggtgcccgccgagagagccctgtacagagatgtgatgctggaaaactacgaggccgtggcttttgtggccgtgcctcctacaagcaagcccgctctggtgtcccacctggaacagggcaaggaaagctgcttcatccggcctccaggcgtgctgagcagaagcgactggcgggccggaggatctggctccggcagcggccccaagaaaaagagaaaagtctaagctgccttctgcggggcttgccttctggccatgcccttcttctctcccttgcacctgtacctcttggtctttgaataaagcctgagtaggaaggctagcaaaaaaaaaaaaaaaaaaaaaaaaaaaaaaaaaaaaaaaaaaaaaaaaaaaaaaaaaaaaaaaaaaaaaaaaaaaaaaaa

SEQ ID NO: 18528 - RNA, 9494 nt, synthetic construct
  source 1..9494: mol_type = other RNA
aggaaataagagagaaaagaagagtaagaagaaatataagagccaccatggcccctaagaagaagcgtaaagtgagccggatggaacgcctcgtctacgaggtgcggcagaagtgcagaaacatcgaggacatctgcatctcctgcggatctctgaacgtgaccctggagcacccactgttcatcggcggcatgtgccagaactgtaaaaactgttttctggagtgtgcctatcaatacgacgatgacggctaccagagctactgcaccatctgttgcggcggaagagaggtgctgatgtgtggaaataacaactgctgccggtgcttctgcgtggaatgcgtggacctgctggtgggccccggcgccgcccaggccgctattaaggaagatccttggaactgctacatgtgcggccacaagggcacatacggcctgctgagacggagagaggactggcctagcagactgcagatgttcttcgccaataaccacgaccaggagttcgacccccctaaggtgtaccctcccgtccccgccgagaagagaaagcccatccgggtcctgagcctgttcgatggcatcgccaccggtctgctggtgctgaaggacctgggcatccaggtggataggtacattgcctccgaggtgtgcgaggactccatcaccgtgggaatggtgcgtcatcagggcaagatcatgtacgtgggcgacgtgcggagcgtgacacagaagcatatccaggagtggggccctttcgacctggtgatcggcggcagcccttgcaatgacctgagcatcgtgaacccagcccggaagggcctgtacgagggaaccggcagactgttcttcgagttttacagactgctgcacgacgcccggcctaaggaaggcgacgaccggcccttcttttggctgttcgagaatgtggtggccatgggagtcagcgacaagcgggatattagccggttcctggagagcaaccccgtgatgatcgatgccaaggaagtgagcgccgcccaccgggccagatacttctggggcaatctgcctggcatgaacagacccctggccagcaccgtgaacgacaagctggagctgcaggagtgcctggagcacggccggatcgccaagttcagcaaggtgagaaccatcaccacccgaagcaacagcatcaaacaaggcaaggaccagcactttcctgtgttcatgaacgagaaggaggacatcctgtggtgtaccgagatggagagagtgttcgggttcccagtccactacacagatgtcagcaacatgtctagactggccagacagagactgctgggaagaagctggtccgtccctgtgatcagacacctgttcgcccctctgaaggagtacttcgcctgcgtgagcagcggcaacagcaacgccaacagccggggccccagcttctctagcggcctggtgccactgtccctgagagggagccacatgggccccatggagatctacaaaaccgtgagcgcctggaagcggcagcctgtgcgcgtgctgagcctgtttcggaatatcgataaagtcctgaaaagcctgggattcctggagagcggctctggctccggcggtggcaccctgaagtacgtggaggatgtgacaaacgtggtcagacgggatgtggagaagtggggccccttcgatctggtgtacggcagcacccaacccctgggcagctcttgtgaccggtgccctggctggtacatgtttcagttccaccggatcctgcagtacgccctgccgagacaggagtcccagcggccattcttttggattttcatggacaacttgctgctgaccgaggatgaccaggaaactaccactcggttcctgcagaccgaagccgtgaccctgcaggacgtgagaggccgggactaccagaacgccatgcgggtgtggtccaacatccctggactgaaaagcaagcacgcacctctgacccctaaagaagaggagtacctgcaggcccaggtgcggagcagaagcaagctggacgcccctaaggtggatctgctggtgaagaattgcctcctgcccctgagagagtacttcaagtatttcagccagaatagtctgcccctgggaggcagcggcggcggcgccctggtgacatttgaggacgtcgccgtgcggttcacccaggaggaatgggctctgctggatccttctcagaaaatcctgtaccgggacgtgatgagagagacataccggaatctgacctccgtgggcatcaactgggaatgttgggaccttgaagcctgcttcagaagcctgggaagaaacctgagagtgcaggtggtgaagagaaagtgcgagctgaccaacagcggcccctgcgccgagggcggcccaagcagcggcgcccctcctcccagcggcggcagcccagccggctccccaacctctaccgaggagggcacctctgagtccgccacccccgagagcggccctggcacctccaccgagcccagcgagggcagcgcacccggcagccctgccggcagccccacctccacagaggagggaaccagcaccgagcccagcgaaggcagcgccccaggcaccagcaccgagcctagtgagcaggagattaaacggatcaacaagatcagaagaagacttgtgaaagacagcaacaccaagaaggccggcaagacaggccccatgaaaaccctgctggttagagtgatgacacccgatctgagagagcggctggaaaacctgagaaagaagcctgaaaatatcccccagcccatcagcaatacatctagagccaacctgaataagctgctgaccgattacaccgaaatgaagaaggcgatcctgcatgtgtactgggaagagttccagaaggaccctgtgggcctgatgagccgggtggcccagcctgccagcaagaagatcgatcagaacaagctgaaacctgagatggacgagaagggcaacctgaccaccgccggctttgcctgctctcagtgtggccagcccctgttcgtgtacaagctggagcaggtgtctgagaagggcaaggcttacaccaactacttcggacggtgcaatgtggccgagcacgaaaagctgatcctgctggcccagctgaagcccgagaaggatagcgacgaagccgtgacatatagcctgggaaagtttgggcagagggccctggatttctacagcattcatgtgaccaaggagtccacccaccccgtgaagcccctggcccagatcgccggaaacagatacgcctccggacctgtgggaaaggccctgagcgacgcatgtatgggcacaatcgcctccttcctgtctaagtaccaggacatcatcatcgaacaccagaaggtggtgaagggcaaccagaagagactggagagcctgcgggagctggccggcaaggaaaacctggaataccctagcgtgaccctgccacctcagcctcacaccaaggagggcgttgatgcctacaacgaagtgatcgcccgggtgcgaatgtgggtgaacctgaacctgtggcagaagctgaagctaagcagagatgatgccaagcctctgctgagactgaagggattcccttcctttcctctggtcgagagacaggccaacgaagtggactggtgggacatggtgtgtaacgtgaagaagctgatcaacgagaaaaaggaggatggcaaggtgttttggcagaatctggctggctacaagagacaggaagccctgagaccatacctgagcagcgaggaagatcggaagaagggaaagaaattcgctcggtaccagctgggcgacctgctgctgcacctggaaaagaagcacggcgaggactggggaaaggtgtacgacgaggcctgggagcggattgacaagaaagtggaaggcctgagcaagcacatcaagctggaagaggaacggagaagcgaggacgcccagagcaaggccgccctgaccgactggctgcgggctaaggccagcttcgtgatcgagggcctgaaggaggccgacaaggacgagttctgcagatgcgagctgaagctgcagaagtggtacggggacctgcggggaaagcccttcgccatcgaagccgagaacagcatcctggacatcagcggcttcagcaagcagtacaactgtgccttcatctggcagaaggacggcgtgaagaagctgaacctgtacctgatcatcaactacttcaagggcggcaagctgcggttcaagaagatcaaacctgaagccttcgaagccaacagattctacaccgtgatcaacaaaaagagcggcgagatcgtgcccatggaggtgaacttcaacttcgacgaccccaacctgatcatcctgcctctggcctttggcaagagacagggcagagaattcatctggaacgacctgctgtccctggaaaccggcagcctgaagctggccaacggaagagtgatcgagaagacactgtacaacagaagaacccggcaggatgagcctgccctgttcgtggccctgaccttcgagcggcgggaggtcctggactcctccaatatcaaaccaatgaacctgatcggcgtggcaagaggcgaaaacatccccgccgtgatcgccctgaccgaccccgagggctgcccactgagccggtttaaggatagcctgggaaacccaacccacatcctgagaatcggcgagagctataaggagaagcagcggaccatccaggccaagaaggaggtggagcagcggagagccggcggctacagccggaagtacgccagcaaagccaagaatctggcagacgatatggtgagaaacaccgctagagatctgctgtactacgccgtgacccaggatgccatgctgatcttcgccaacctgagccggggcttcggccggcagggcaagcggaccttcatggccgagagacagtacacacggatggaggactggctgaccgccaagctggcctacgagggcctgagcaagacctacctgtccaagacactggcccagtacacctccaagacatgcagcaactgtgggtttaccatcaccagcgccgactacgacagggtgctggagaagctgaagaagacagcaacaggctggatgaccacaattaacggcaaggagctgaaggtggagggccagattacctactacaacagatacaagagacagaacgtagtcaaggacctgtccgtcgagctggatagactgagcgaagaatctgtgaacaacgacatctcctcctggacaaagggcagaagcggagaagctctgagcctcctgaagaaaagattctcccatagacccgtgcaggagaagttcgtgtgcctgaactgcggcttcgagacacacgcagccgagcaagccgccctgaacatcgccagatcctggctgttcctgcggagccaggagtacaagaaataccagacaaacaagacaaccggcaacaccgataagagagccttcgtcgagacctggcagtccttttaccggaagaagcttaaggaggtgtggaaacctgccgtgcggtctggcggatctggcggaggctccgtgacctacaacgacgtgcacgtggacatcacccaggaggaatgggctctgatggaccccagccagcggaacctgtacaaggatgtgatggtcgagacatacatgaacctgaccgccatcggatataattgggagaacctggaagtggaagaaccatgtcagaaccccctgaagcacggcagacacgagagacctcatacaggcgagaaaccttacgagtacaatcagtgcggcaaggccttcgcccaacctggcggcccaagcagcggcgcccctcctcccagcggcggcagcccagccggctccccaacctctaccgaggagggcacctctgagtccgccacccccgagagcggccctggcacctccaccgagcccagcgagggcagcgcacccggcagccctgccggcagccccacctccacagaggagggaaccagcaccgagcccagcgaaggcagcgccccaggcaccagcaccgagcctagtgagcaggagattaaacggatcaacaagatcagaagaagacttgtgaaagacagcaacaccaagaaggccggcaagacaggccccatgaaaaccctgctggttagagtgatgacacccgatctgagagagcggctggaaaacctgagaaagaagcctgaaaatatcccccagcccatcagcaatacatctagagccaacctgaataagctgctgaccgattacaccgaaatgaagaaggcgatcctgcatgtgtactgggaagagttccagaaggaccctgtgggcctgatgagccgggtggcccagcctgccagcaagaagatcgatcagaacaagctgaaacctgagatggacgagaagggcaacctgaccaccgccggctttgcctgctctcagtgtggccagcccctgttcgtgtacaagctggagcaggtgtctgagaagggcaaggcttacaccaactacttcggacggtgcaatgtggccgagcacgaaaagctgatcctgctggcccagctgaagcccgagaaggatagcgacgaagccgtgacatatagcctgggaaagtttgggcagagggccctggatttctacagcattcatgtgaccaaggagtccacccaccccgtgaagcccctggcccagatcgccggaaacagatacgcctccggacctgtgggaaaggccctgagcgacgcatgtatgggcacaatcgcctccttcctgtctaagtaccaggacatcatcatcgaacaccagaaggtggtgaagggcaaccagaagagactggagagcctgcgggagctggccggcaaggaaaacctggaataccctagcgtgaccctgccacctcagcctcacaccaaggagggcgttgatgcctacaacgaagtgatcgcccgggtgcgaatgtgggtgaacctgaacctgtggcagaagctgaagctaagcagagatgatgccaagcctctgctgagactgaagggattcccttcctttcctctggtcgagagacaggccaacgaagtggactggtgggacatggtgtgtaacgtgaagaagctgatcaacgagaaaaaggaggatggcaaggtgttttggcagaatctggctggctacaagagacaggaagccctgagaccatacctgagcagcgaggaagatcggaagaagggaaagaaattcgctcggtaccagctgggcgacctgctgctgcacctggaaaagaagcacggcgaggactggggaaaggtgtacgacgaggcctgggagcggattgacaagaaagtggaaggcctgagcaagcacatcaagctggaagaggaacggagaagcgaggacgcccagagcaaggccgccctgaccgactggctgcgggctaaggccagcttcgtgatcgagggcctgaaggaggccgacaaggacgagttctgcagatgcgagctgaagctgcagaagtggtacggggacctgcggggaaagcccttcgccatcgaagccgagaacagcatcctggacatcagcggcttcagcaagcagtacaactgtgccttcatctggcagaaggacggcgtgaagaagctgaacctgtacctgatcatcaactacttcaagggcggcaagctgcggttcaagaagatcaaacctgaagccttcgaagccaacagattctacaccgtgatcaacaaaaagagcggcgagatcgtgcccatggaggtgaacttcaacttcgacgaccccaacctgatcatcctgcctctggcctttggcaagagacagggcagagaattcatctggaacgacctgctgtccctggaaaccggcagcctgaagctggccaacggaagagtgatcgagaagacactgtacaacagaagaacccggcaggatgagcctgccctgttcgtggccctgaccttcgagcggcgggaggtcctggactcctccaatatcaaaccaatgaacctgatcggcgtggcaagaggcgaaaacatccccgccgtgatcgccctgaccgaccccgagggctgcccactgagccggtttaaggatagcctgggaaacccaacccacatcctgagaatcggcgagagctataaggagaagcagcggaccatccaggccaagaaggaggtggagcagcggagagccggcggctacagccggaagtacgccagcaaagccaagaatctggcagacgatatggtgagaaacaccgctagagatctgctgtactacgccgtgacccaggatgccatgctgatcttcgccaacctgagccggggcttcggccggcagggcaagcggaccttcatggccgagagacagtacacacggatggaggactggctgaccgccaagctggcctacgagggcctgagcaagacctacctgtccaagacactggcccagtacacctccaagacatgcagcaactgtgggtttaccatcaccagcgccgactacgacagggtgctggagaagctgaagaagacagcaacaggctggatgaccacaattaacggcaaggagctgaaggtggagggccagattacctactacaacagatacaagagacagaacgtagtcaaggacctgtccgtcgagctggatagactgagcgaagaatctgtgaacaacgacatctcctcctggacaaagggcagaagcggagaagctctgagcctcctgaagaaaagattctcccatagacccgtgcaggagaagttcgtgtgcctgaactgcggcttcgagacacacgcagccgagcaagccgccctgaacatcgccagatcctggctgttcctgcggagccaggagtacaagaaataccagacaaacaagacaaccggcaacaccgataagagagccttcgtcgagacctggcagtccttttaccggaagaagcttaaggaggtgtggaaacctgccgtgcggtctggcggatctggcggaggctccttctaaagcccctatcacattcggcgacctggccatctacttcagccaggaggaatgggagtggctgagccccatccagaaggacctgtacgaggacgtgatgctggaaaactacagaaatctggtgtccctgggcctcagctttagacgccccaacgtgatcaccctgctggaaaagggcaaggccccatggatggtcgagcctgctagacggcggagaggacctgatagcggcagcaaggtgggatctggctccggcagcggccccaagaaaaagagaaaagtctaagctgccttctgcggggcttgccttctggccatgcccttcttctctcccttgcacctgtacctcttggtctttgaataaagcctgagtaggaaggctagcaaaaaaaaaaaaaaaaaaaaaaaaaaaaaaaaaaaaaaaaaaaaaaaaaaaaaaaaaaaaaaaaaaaaaaaaaaaaaaaa

SEQ ID NO: 18529 - RNA, 9494 nt, synthetic construct
  source 1..9494: mol_type = other RNA
aggaaataagagagaaaagaagagtaagaagaaatataagagccaccatggcccctaagaagaagcgtaaagtgagccggatggaacgcctcgtctacgaggtgcggcagaagtgcagaaacatcgaggacatctgcatctcctgcggatctctgaacgtgaccctggagcacccactgttcatcggcggcatgtgccagaactgtaaaaactgttttctggagtgtgcctatcaatacgacgatgacggctaccagagctactgcaccatctgttgcggcggaagagaggtgctgatgtgtggaaataacaactgctgccggtgcttctgcgtggaatgcgtggacctgctggtgggccccggcgccgcccaggccgctattaaggaagatccttggaactgctacatgtgcggccacaagggcacatacggcctgctgagacggagagaggactggcctagcagactgcagatgttcttcgccaataaccacgaccaggagttcgacccccctaaggtgtaccctcccgtccccgccgagaagagaaagcccatccgggtcctgagcctgttcgatggcatcgccaccggtctgctggtgctgaaggacctgggcatccaggtggataggtacattgcctccgaggtgtgcgaggactccatcaccgtgggaatggtgcgtcatcagggcaagatcatgtacgtgggcgacgtgcggagcgtgacacagaagcatatccaggagtggggccctttcgacctggtgatcggcggcagcccttgcaatgacctgagcatcgtgaacccagcccggaagggcctgtacgagggaaccggcagactgttcttcgagttttacagactgctgcacgacgcccggcctaaggaaggcgacgaccggcccttcttttggctgttcgagaatgtggtggccatgggagtcagcgacaagcgggatattagccggttcctggagagcaaccccgtgatgatcgatgccaaggaagtgagcgccgcccaccgggccagatacttctggggcaatctgcctggcatgaacagacccctggccagcaccgtgaacgacaagctggagctgcaggagtgcctggagcacggccggatcgccaagttcagcaaggtgagaaccatcaccacccgaagcaacagcatcaaacaaggcaaggaccagcactttcctgtgttcatgaacgagaaggaggacatcctgtggtgtaccgagatggagagagtgttcgggttcccagtccactacacagatgtcagcaacatgtctagactggccagacagagactgctgggaagaagctggtccgtccctgtgatcagacacctgttcgcccctctgaaggagtacttcgcctgcgtgagcagcggcaacagcaacgccaacagccggggccccagcttctctagcggcctggtgccactgtccctgagagggagccacatgggccccatggagatctacaaaaccgtgagcgcctggaagcggcagcctgtgcgcgtgctgagcctgtttcggaatatcgataaagtcctgaaaagcctgggattcctggagagcggctctggctccggcggtggcaccctgaagtacgtggaggatgtgacaaacgtggtcagacgggatgtggagaagtggggccccttcgatctggtgtacggcagcacccaacccctgggcagctcttgtgaccggtgccctggctggtacatgtttcagttccaccggatcctgcagtacgccctgccgagacaggagtcccagcggccattcttttggattttcatggacaacttgctgctgaccgaggatgaccaggaaactaccactcggttcctgcagaccgaagccgtgaccctgcaggacgtgagaggccgggactaccagaacgccatgcgggtgtggtccaacatccctggactgaaaagcaagcacgcacctctgacccctaaagaagaggagtacctgcaggcccaggtgcggagcagaagcaagctggacgcccctaaggtggatctgctggtgaagaattgcctcctgcccctgagagagtacttcaagtatttcagccagaatagtctgcccctgggaggcagcggcggcggcgccctggtgacatttgaggacgtcgccgtgcggttcacccaggaggaatgggctctgctggatccttctcagaaaatcctgtaccgggacgtgatgagagagacataccggaatctgacctccgtgggcatcaactgggaatgttgggaccttgaagcctgcttcagaagcctgggaagaaacctgagagtgcaggtggtgaagagaaagtgcgagctgaccaacagcggcccctgcgccgagggcggcccaagcagcggcgcccctcctcccagcggcggcagcccagccggctccccaacctctaccgaggagggcacctctgagtccgccacccccgagagcggccctggcacctccaccgagcccagcgagggcagcgcacccggcagccctgccggcagccccacctccacagaggagggaaccagcaccgagcccagcgaaggcagcgccccaggcaccagcaccgagcctagtgagcaggagattaaacggatcaacaagatcagaagaagacttgtgaaagacagcaacaccaagaaggccggcaagacaggccccatgaaaaccctgctggttagagtgatgacacccgatctgagagagcggctggaaaacctgagaaagaagcctgaaaatatcccccagcccatcagcaatacatctagagccaacctgaataagctgctgaccgattacaccgaaatgaagaaggcgatcctgcatgtgtactgggaagagttccagaaggaccctgtgggcctgatgagccgggtggcccagcctgccagcaagaagatcgatcagaacaagctgaaacctgagatggacgagaagggcaacctgaccaccgccggctttgcctgctctcagtgtggccagcccctgttcgtgtacaagctggagcaggtgtctgagaagggcaaggcttacaccaactacttcggacggtgcaatgtggccgagcacgaaaagctgatcctgctggcccagctgaagcccgagaaggatagcgacgaagccgtgacatatagcctgggaaagtttgggcagagggccctggatttctacagcattcatgtgaccaaggagtccacccaccccgtgaagcccctggcccagatcgccggaaacagatacgcctccggacctgtgggaaaggccctgagcgacgcatgtatgggcacaatcgcctccttcctgtctaagtaccaggacatcatcatcgaacaccagaaggtggtgaagggcaaccagaagagactggagagcctgcgggagctggccggcaaggaaaacctggaataccctagcgtgaccctgccacctcagcctcacaccaaggagggcgttgatgcctacaacgaagtgatcgcccgggtgcgaatgtgggtgaacctgaacctgtggcagaagctgaagctaagcagagatgatgccaagcctctgctgagactgaagggattcccttcctttcctctggtcgagagacaggccaacgaagtggactggtgggacatggtgtgtaacgtgaagaagctgatcaacgagaaaaaggaggatggcaaggtgttttggcagaatctggctggctacaagagacaggaagccctgagaccatacctgagcagcgaggaagatcggaagaagggaaagaaattcgctcggtaccagctgggcgacctgctgctgcacctggaaaagaagcacggcgaggactggggaaaggtgtacgacgaggcctgggagcggattgacaagaaagtggaaggcctgagcaagcacatcaagctggaagaggaacggagaagcgaggacgcccagagcaaggccgccctgaccgactggctgcgggctaaggccagcttcgtgatcgagggcctgaaggaggccgacaaggacgagttctgcagatgcgagctgaagctgcagaagtggtacggggacctgcggggaaagcccttcgccatcgaagccgagaacagcatcctggacatcagcggcttcagcaagcagtacaactgtgccttcatctggcagaaggacggcgtgaagaagctgaacctgtacctgatcatcaactacttcaagggcggcaagctgcggttcaagaagatcaaacctgaagccttcgaagccaacagattctacaccgtgatcaacaaaaagagcggcgagatcgtgcccatggaggtgaacttcaacttcgacgaccccaacctgatcatcctgcctctggcctttggcaagagacagggcagagaattcatctggaacgacctgctgtccctggaaaccggcagcctgaagctggccaacggaagagtgatcgagaagacactgtacaacagaagaacccggcaggatgagcctgccctgttcgtggccctgaccttcgagcggcgggaggtcctggactcctccaatatcaaaccaatgaacctgatcggcgtggcaagaggcgaaaacatccccgccgtgatcgccctgaccgaccccgagggctgcccactgagccggtttaaggatagcctgggaaacccaacccacatcctgagaatcggcgagagctataaggagaagcagcggaccatccaggccaagaaggaggtggagcagcggagagccggcggctacagccggaagtacgccagcaaagccaagaatctggcagacgatatggtgagaaacaccgctagagatctgctgtactacgccgtgacccaggatgccatgctgatcttcgccaacctgagccggggcttcggccggcagggcaagcggaccttcatggccgagagacagtacacacggatggaggactggctgaccgccaagctggcctacgagggcctgagcaagacctacctgtccaagacactggcccagtacacctccaagacatgcagcaactgtgggtttaccatcaccagcgccgactacgacagggtgctggagaagctgaagaagacagcaacaggctggatgaccacaattaacggcaaggagctgaaggtggagggccagattacctactacaacagatacaagagacagaacgtagtcaaggacctgtccgtcgagctggatagactgagcgaagaatctgtgaacaacgacatctcctcctggacaaagggcagaagcggagaagctctgagcctcctgaagaaaagattctcccatagacccgtgcaggagaagttcgtgtgcctgaactgcggcttcgagacacacgcagccgagcaagccgccctgaacatcgccagatcctggctgttcctgcggagccaggagtacaagaaataccagacaaacaagacaaccggcaacaccgataagagagccttcgtcgagacctggcagtccttttaccggaagaagcttaaggaggtgtggaaacctgccgtgcggtctggcggatctggcggaggctccgtgacctacaacgacgtgcacgtggacatcacccaggaggaatgggctctgatggaccccagccagcggaacctgtacaaggatgtgatggtcgagacatacatgaacctgaccgccatcggatataattgggagaacctggaagtggaagaaccatgtcagaaccccctgaagcacggcagacacgagagacctcatacaggcgagaaaccttacgagtacaatcagtgcggcaaggccttcgcccaacctggcggcccaagcagcggcgcccctcctcccagcggcggcagcccagccggctccccaacctctaccgaggagggcacctctgagtccgccacccccgagagcggccctggcacctccaccgagcccagcgagggcagcgcacccggcagccctgccggcagccccacctccacagaggagggaaccagcaccgagcccagcgaaggcagcgccccaggcaccagcaccgagcctagtgagcaggagattaaacggatcaacaagatcagaagaagacttgtgaaagacagcaacaccaagaaggccggcaagacaggccccatgaaaaccctgctggttagagtgatgacacccgatctgagagagcggctggaaaacctgagaaagaagcctgaaaatatcccccagcccatcagcaatacatctagagccaacctgaataagctgctgaccgattacaccgaaatgaagaaggcgatcctgcatgtgtactgggaagagttccagaaggaccctgtgggcctgatgagccgggtggcccagcctgccagcaagaagatcgatcagaacaagctgaaacctgagatggacgagaagggcaacctgaccaccgccggctttgcctgctctcagtgtggccagcccctgttcgtgtacaagctggagcaggtgtctgagaagggcaaggcttacaccaactacttcggacggtgcaatgtggccgagcacgaaaagctgatcctgctggcccagctgaagcccgagaaggatagcgacgaagccgtgacatatagcctgggaaagtttgggcagagggccctggatttctacagcattcatgtgaccaaggagtccacccaccccgtgaagcccctggcccagatcgccggaaacagatacgcctccggacctgtgggaaaggccctgagcgacgcatgtatgggcacaatcgcctccttcctgtctaagtaccaggacatcatcatcgaacaccagaaggtggtgaagggcaaccagaagagactggagagcctgcgggagctggccggcaaggaaaacctggaataccctagcgtgaccctgccacctcagcctcacaccaaggagggcgttgatgcctacaacgaagtgatcgcccgggtgcgaatgtgggtgaacctgaacctgtggcagaagctgaagctaagcagagatgatgccaagcctctgctgagactgaagggattcccttcctttcctctggtcgagagacaggccaacgaagtggactggtgggacatggtgtgtaacgtgaagaagctgatcaacgagaaaaaggaggatggcaaggtgttttggcagaatctggctggctacaagagacaggaagccctgagaccatacctgagcagcgaggaagatcggaagaagggaaagaaattcgctcggtaccagctgggcgacctgctgctgcacctggaaaagaagcacggcgaggactggggaaaggtgtacgacgaggcctgggagcggattgacaagaaagtggaaggcctgagcaagcacatcaagctggaagaggaacggagaagcgaggacgcccagagcaaggccgccctgaccgactggctgcgggctaaggccagcttcgtgatcgagggcctgaaggaggccgacaaggacgagttctgcagatgcgagctgaagctgcagaagtggtacggggacctgcggggaaagcccttcgccatcgaagccgagaacagcatcctggacatcagcggcttcagcaagcagtacaactgtgccttcatctggcagaaggacggcgtgaagaagctgaacctgtacctgatcatcaactacttcaagggcggcaagctgcggttcaagaagatcaaacctgaagccttcgaagccaacagattctacaccgtgatcaacaaaaagagcggcgagatcgtgcccatggaggtgaacttcaacttcgacgaccccaacctgatcatcctgcctctggcctttggcaagagacagggcagagaattcatctggaacgacctgctgtccctggaaaccggcagcctgaagctggccaacggaagagtgatcgagaagacactgtacaacagaagaacccggcaggatgagcctgccctgttcgtggccctgaccttcgagcggcgggaggtcctggactcctccaatatcaaaccaatgaacctgatcggcgtggcaagaggcgaaaacatccccgccgtgatcgccctgaccgaccccgagggctgcccactgagccggtttaaggatagcctgggaaacccaacccacatcctgagaatcggcgagagctataaggagaagcagcggaccatccaggccaagaaggaggtggagcagcggagagccggcggctacagccggaagtacgccagcaaagccaagaatctggcagacgatatggtgagaaacaccgctagagatctgctgtactacgccgtgacccaggatgccatgctgatcttcgccaacctgagccggggcttcggccggcagggcaagcggaccttcatggccgagagacagtacacacggatggaggactggctgaccgccaagctggcctacgagggcctgagcaagacctacctgtccaagacactggcccagtacacctccaagacatgcagcaactgtgggtttaccatcaccagcgccgactacgacagggtgctggagaagctgaagaagacagcaacaggctggatgaccacaattaacggcaaggagctgaaggtggagggccagattacctactacaacagatacaagagacagaacgtagtcaaggacctgtccgtcgagctggatagactgagcgaagaatctgtgaacaacgacatctcctcctggacaaagggcagaagcggagaagctctgagcctcctgaagaaaagattctcccatagacccgtgcaggagaagttcgtgtgcctgaactgcggcttcgagacacacgcagccgagcaagccgccctgaacatcgccagatcctggctgttcctgcggagccaggagtacaagaaataccagacaaacaagacaaccggcaacaccgataagagagccttcgtcgagacctggcagtccttttaccggaagaagcttaaggaggtgtggaaacctgccgtgcggtctggcggatctggcggaggctcctgagatgggcctgctgacattcagagacatcgctatcgagttcagcctggaggaatggcaatgtctggactgcgcccagagaaatctgtacagagatgtgatgctggaaaactaccggaacctggtgtctctgggcatcgccgtgtccaagcccgacctgatcacctgcctcgagcagaacaaggaaagccagaacatcaagcggaacaaaatggtcgccaagcaccctgtgatgcacagccacggatctggctccggcagcggccccaagaaaaagagaaaagtctaagctgccttctgcggggcttgccttctggccatgcccttcttctctcccttgcacctgtacctcttggtctttgaataaagcctgagtaggaaggctagcaaaaaaaaaaaaaaaaaaaaaaaaaaaaaaaaaaaaaaaaaaaaaaaaaaaaaaaaaaaaaaaaaaaaaaaaaaaaaaaa

SEQ ID NO: 18530 - RNA, 9494 nt, synthetic construct
  source 1..9494: mol_type = other RNA
aggaaataagagagaaaagaagagtaagaagaaatataagagccaccatggcccctaagaagaagcgtaaagtgagccggatggaacgcctcgtctacgaggtgcggcagaagtgcagaaacatcgaggacatctgcatctcctgcggatctctgaacgtgaccctggagcacccactgttcatcggcggcatgtgccagaactgtaaaaactgttttctggagtgtgcctatcaatacgacgatgacggctaccagagctactgcaccatctgttgcggcggaagagaggtgctgatgtgtggaaataacaactgctgccggtgcttctgcgtggaatgcgtggacctgctggtgggccccggcgccgcccaggccgctattaaggaagatccttggaactgctacatgtgcggccacaagggcacatacggcctgctgagacggagagaggactggcctagcagactgcagatgttcttcgccaataaccacgaccaggagttcgacccccctaaggtgtaccctcccgtccccgccgagaagagaaagcccatccgggtcctgagcctgttcgatggcatcgccaccggtctgctggtgctgaaggacctgggcatccaggtggataggtacattgcctccgaggtgtgcgaggactccatcaccgtgggaatggtgcgtcatcagggcaagatcatgtacgtgggcgacgtgcggagcgtgacacagaagcatatccaggagtggggccctttcgacctggtgatcggcggcagcccttgcaatgacctgagcatcgtgaacccagcccggaagggcctgtacgagggaaccggcagactgttcttcgagttttacagactgctgcacgacgcccggcctaaggaaggcgacgaccggcccttcttttggctgttcgagaatgtggtggccatgggagtcagcgacaagcgggatattagccggttcctggagagcaaccccgtgatgatcgatgccaaggaagtgagcgccgcccaccgggccagatacttctggggcaatctgcctggcatgaacagacccctggccagcaccgtgaacgacaagctggagctgcaggagtgcctggagcacggccggatcgccaagttcagcaaggtgagaaccatcaccacccgaagcaacagcatcaaacaaggcaaggaccagcactttcctgtgttcatgaacgagaaggaggacatcctgtggtgtaccgagatggagagagtgttcgggttcccagtccactacacagatgtcagcaacatgtctagactggccagacagagactgctgggaagaagctggtccgtccctgtgatcagacacctgttcgcccctctgaaggagtacttcgcctgcgtgagcagcggcaacagcaacgccaacagccggggccccagcttctctagcggcctggtgccactgtccctgagagggagccacatgggccccatggagatctacaaaaccgtgagcgcctggaagcggcagcctgtgcgcgtgctgagcctgtttcggaatatcgataaagtcctgaaaagcctgggattcctggagagcggctctggctccggcggtggcaccctgaagtacgtggaggatgtgacaaacgtggtcagacgggatgtggagaagtggggccccttcgatctggtgtacggcagcacccaacccctgggcagctcttgtgaccggtgccctggctggtacatgtttcagttccaccggatcctgcagtacgccctgccgagacaggagtcccagcggccattcttttggattttcatggacaacttgctgctgaccgaggatgaccaggaaactaccactcggttcctgcagaccgaagccgtgaccctgcaggacgtgagaggccgggactaccagaacgccatgcgggtgtggtccaacatccctggactgaaaagcaagcacgcacctctgacccctaaagaagaggagtacctgcaggcccaggtgcggagcagaagcaagctggacgcccctaaggtggatctgctggtgaagaattgcctcctgcccctgagagagtacttcaagtatttcagccagaatagtctgcccctgggaggcagcggcggcggcgccctggtgacatttgaggacgtcgccgtgcggttcacccaggaggaatgggctctgctggatccttctcagaaaatcctgtaccgggacgtgatgagagagacataccggaatctgacctccgtgggcatcaactgggaatgttgggaccttgaagcctgcttcagaagcctgggaagaaacctgagagtgcaggtggtgaagagaaagtgcgagctgaccaacagcggcccctgcgccgagggcggcccaagcagcggcgcccctcctcccagcggcggcagcccagccggctccccaacctctaccgaggagggcacctctgagtccgccacccccgagagcggccctggcacctccaccgagcccagcgagggcagcgcacccggcagccctgccggcagccccacctccacagaggagggaaccagcaccgagcccagcgaaggcagcgccccaggcaccagcaccgagcctagtgagcaggagattaaacggatcaacaagatcagaagaagacttgtgaaagacagcaacaccaagaaggccggcaagacaggccccatgaaaaccctgctggttagagtgatgacacccgatctgagagagcggctggaaaacctgagaaagaagcctgaaaatatcccccagcccatcagcaatacatctagagccaacctgaataagctgctgaccgattacaccgaaatgaagaaggcgatcctgcatgtgtactgggaagagttccagaaggaccctgtgggcctgatgagccgggtggcccagcctgccagcaagaagatcgatcagaacaagctgaaacctgagatggacgagaagggcaacctgaccaccgccggctttgcctgctctcagtgtggccagcccctgttcgtgtacaagctggagcaggtgtctgagaagggcaaggcttacaccaactacttcggacggtgcaatgtggccgagcacgaaaagctgatcctgctggcccagctgaagcccgagaaggatagcgacgaagccgtgacatatagcctgggaaagtttgggcagagggccctggatttctacagcattcatgtgaccaaggagtccacccaccccgtgaagcccctggcccagatcgccggaaacagatacgcctccggacctgtgggaaaggccctgagcgacgcatgtatgggcacaatcgcctccttcctgtctaagtaccaggacatcatcatcgaacaccagaaggtggtgaagggcaaccagaagagactggagagcctgcgggagctggccggcaaggaaaacctggaataccctagcgtgaccctgccacctcagcctcacaccaaggagggcgttgatgcctacaacgaagtgatcgcccgggtgcgaatgtgggtgaacctgaacctgtggcagaagctgaagctaagcagagatgatgccaagcctctgctgagactgaagggattcccttcctttcctctggtcgagagacaggccaacgaagtggactggtgggacatggtgtgtaacgtgaagaagctgatcaacgagaaaaaggaggatggcaaggtgttttggcagaatctggctggctacaagagacaggaagccctgagaccatacctgagcagcgaggaagatcggaagaagggaaagaaattcgctcggtaccagctgggcgacctgctgctgcacctggaaaagaagcacggcgaggactggggaaaggtgtacgacgaggcctgggagcggattgacaagaaagtggaaggcctgagcaagcacatcaagctggaagaggaacggagaagcgaggacgcccagagcaaggccgccctgaccgactggctgcgggctaaggccagcttcgtgatcgagggcctgaaggaggccgacaaggacgagttctgcagatgcgagctgaagctgcagaagtggtacggggacctgcggggaaagcccttcgccatcgaagccgagaacagcatcctggacatcagcggcttcagcaagcagtacaactgtgccttcatctggcagaaggacggcgtgaagaagctgaacctgtacctgatcatcaactacttcaagggcggcaagctgcggttcaagaagatcaaacctgaagccttcgaagccaacagattctacaccgtgatcaacaaaaagagcggcgagatcgtgcccatggaggtgaacttcaacttcgacgaccccaacctgatcatcctgcctctggcctttggcaagagacagggcagagaattcatctggaacgacctgctgtccctggaaaccggcagcctgaagctggccaacggaagagtgatcgagaagacactgtacaacagaagaacccggcaggatgagcctgccctgttcgtggccctgaccttcgagcggcgggaggtcctggactcctccaatatcaaaccaatgaacctgatcggcgtggcaagaggcgaaaacatccccgccgtgatcgccctgaccgaccccgagggctgcccactgagccggtttaaggatagcctgggaaacccaacccacatcctgagaatcggcgagagctataaggagaagcagcggaccatccaggccaagaaggaggtggagcagcggagagccggcggctacagccggaagtacgccagcaaagccaagaatctggcagacgatatggtgagaaacaccgctagagatctgctgtactacgccgtgacccaggatgccatgctgatcttcgccaacctgagccggggcttcggccggcagggcaagcggaccttcatggccgagagacagtacacacggatggaggactggctgaccgccaagctggcctacgagggcctgagcaagacctacctgtccaagacactggcccagtacacctccaagacatgcagcaactgtgggtttaccatcaccagcgccgactacgacagggtgctggagaagctgaagaagacagcaacaggctggatgaccacaattaacggcaaggagctgaaggtggagggccagattacctactacaacagatacaagagacagaacgtagtcaaggacctgtccgtcgagctggatagactgagcgaagaatctgtgaacaacgacatctcctcctggacaaagggcagaagcggagaagctctgagcctcctgaagaaaagattctcccatagacccgtgcaggagaagttcgtgtgcctgaactgcggcttcgagacacacgcagccgagcaagccgccctgaacatcgccagatcctggctgttcctgcggagccaggagtacaagaaataccagacaaacaagacaaccggcaacaccgataagagagccttcgtcgagacctggcagtccttttaccggaagaagcttaaggaggtgtggaaacctgccgtgcggtctggcggatctggcggaggctccgtgacctacaacgacgtgcacgtggacatcacccaggaggaatgggctctgatggaccccagccagcggaacctgtacaaggatgtgatggtcgagacatacatgaacctgaccgccatcggatataattgggagaacctggaagtggaagaaccatgtcagaaccccctgaagcacggcagacacgagagacctcatacaggcgagaaaccttacgagtacaatcagtgcggcaaggccttcgcccaacctggcggcccaagcagcggcgcccctcctcccagcggcggcagcccagccggctccccaacctctaccgaggagggcacctctgagtccgccacccccgagagcggccctggcacctccaccgagcccagcgagggcagcgcacccggcagccctgccggcagccccacctccacagaggagggaaccagcaccgagcccagcgaaggcagcgccccaggcaccagcaccgagcctagtgagcaggagattaaacggatcaacaagatcagaagaagacttgtgaaagacagcaacaccaagaaggccggcaagacaggccccatgaaaaccctgctggttagagtgatgacacccgatctgagagagcggctggaaaacctgagaaagaagcctgaaaatatcccccagcccatcagcaatacatctagagccaacctgaataagctgctgaccgattacaccgaaatgaagaaggcgatcctgcatgtgtactgggaagagttccagaaggaccctgtgggcctgatgagccgggtggcccagcctgccagcaagaagatcgatcagaacaagctgaaacctgagatggacgagaagggcaacctgaccaccgccggctttgcctgctctcagtgtggccagcccctgttcgtgtacaagctggagcaggtgtctgagaagggcaaggcttacaccaactacttcggacggtgcaatgtggccgagcacgaaaagctgatcctgctggcccagctgaagcccgagaaggatagcgacgaagccgtgacatatagcctgggaaagtttgggcagagggccctggatttctacagcattcatgtgaccaaggagtccacccaccccgtgaagcccctggcccagatcgccggaaacagatacgcctccggacctgtgggaaaggccctgagcgacgcatgtatgggcacaatcgcctccttcctgtctaagtaccaggacatcatcatcgaacaccagaaggtggtgaagggcaaccagaagagactggagagcctgcgggagctggccggcaaggaaaacctggaataccctagcgtgaccctgccacctcagcctcacaccaaggagggcgttgatgcctacaacgaagtgatcgcccgggtgcgaatgtgggtgaacctgaacctgtggcagaagctgaagctaagcagagatgatgccaagcctctgctgagactgaagggattcccttcctttcctctggtcgagagacaggccaacgaagtggactggtgggacatggtgtgtaacgtgaagaagctgatcaacgagaaaaaggaggatggcaaggtgttttggcagaatctggctggctacaagagacaggaagccctgagaccatacctgagcagcgaggaagatcggaagaagggaaagaaattcgctcggtaccagctgggcgacctgctgctgcacctggaaaagaagcacggcgaggactggggaaaggtgtacgacgaggcctgggagcggattgacaagaaagtggaaggcctgagcaagcacatcaagctggaagaggaacggagaagcgaggacgcccagagcaaggccgccctgaccgactggctgcgggctaaggccagcttcgtgatcgagggcctgaaggaggccgacaaggacgagttctgcagatgcgagctgaagctgcagaagtggtacggggacctgcggggaaagcccttcgccatcgaagccgagaacagcatcctggacatcagcggcttcagcaagcagtacaactgtgccttcatctggcagaaggacggcgtgaagaagctgaacctgtacctgatcatcaactacttcaagggcggcaagctgcggttcaagaagatcaaacctgaagccttcgaagccaacagattctacaccgtgatcaacaaaaagagcggcgagatcgtgcccatggaggtgaacttcaacttcgacgaccccaacctgatcatcctgcctctggcctttggcaagagacagggcagagaattcatctggaacgacctgctgtccctggaaaccggcagcctgaagctggccaacggaagagtgatcgagaagacactgtacaacagaagaacccggcaggatgagcctgccctgttcgtggccctgaccttcgagcggcgggaggtcctggactcctccaatatcaaaccaatgaacctgatcggcgtggcaagaggcgaaaacatccccgccgtgatcgccctgaccgaccccgagggctgcccactgagccggtttaaggatagcctgggaaacccaacccacatcctgagaatcggcgagagctataaggagaagcagcggaccatccaggccaagaaggaggtggagcagcggagagccggcggctacagccggaagtacgccagcaaagccaagaatctggcagacgatatggtgagaaacaccgctagagatctgctgtactacgccgtgacccaggatgccatgctgatcttcgccaacctgagccggggcttcggccggcagggcaagcggaccttcatggccgagagacagtacacacggatggaggactggctgaccgccaagctggcctacgagggcctgagcaagacctacctgtccaagacactggcccagtacacctccaagacatgcagcaactgtgggtttaccatcaccagcgccgactacgacagggtgctggagaagctgaagaagacagcaacaggctggatgaccacaattaacggcaaggagctgaaggtggagggccagattacctactacaacagatacaagagacagaacgtagtcaaggacctgtccgtcgagctggatagactgagcgaagaatctgtgaacaacgacatctcctcctggacaaagggcagaagcggagaagctctgagcctcctgaagaaaagattctcccatagacccgtgcaggagaagttcgtgtgcctgaactgcggcttcgagacacacgcagccgagcaagccgccctgaacatcgccagatcctggctgttcctgcggagccaggagtacaagaaataccagacaaacaagacaaccggcaacaccgataagagagccttcgtcgagacctggcagtccttttaccggaagaagcttaaggaggtgtggaaacctgccgtgcggtctggcggatctggcggaggctcctctgctgaccttcgaggacgtcgccgtgtccttcagcgaggaagaatgggagctgctcgatcctcctcagaaaaccctgtacaacgacgtgatgcaagagaactacgagacagtgatctctctgggcctgaagctgaagaacgacaccggaaatgatcagcccatcagcatcagcgccctggaaatgcaggccagcggcagcaaggtgctgcggaaggccagaatgaaagtggctcagaagacaggatctggctccggcagcggccccaagaaaaagagaaaagtctaagctgccttctgcggggcttgccttctggccatgcccttcttctctcccttgcacctgtacctcttggtctttgaataaagcctgagtaggaaggctagcaaaaaaaaaaaaaaaaaaaaaaaaaaaaaaaaaaaaaaaaaaaaaaaaaaaaaaaaaaaaaaaaaaaaaaaaaaaaaaaa

SEQ ID NO: 18531 - RNA, 9485 nt, synthetic construct
  source 1..9485: mol_type = other RNA
aggaaataagagagaaaagaagagtaagaagaaatataagagccaccatggcccctaagaagaagcgtaaagtgagccggatggaacgcctcgtctacgaggtgcggcagaagtgcagaaacatcgaggacatctgcatctcctgcggatctctgaacgtgaccctggagcacccactgttcatcggcggcatgtgccagaactgtaaaaactgttttctggagtgtgcctatcaatacgacgatgacggctaccagagctactgcaccatctgttgcggcggaagagaggtgctgatgtgtggaaataacaactgctgccggtgcttctgcgtggaatgcgtggacctgctggtgggccccggcgccgcccaggccgctattaaggaagatccttggaactgctacatgtgcggccacaagggcacatacggcctgctgagacggagagaggactggcctagcagactgcagatgttcttcgccaataaccacgaccaggagttcgacccccctaaggtgtaccctcccgtccccgccgagaagagaaagcccatccgggtcctgagcctgttcgatggcatcgccaccggtctgctggtgctgaaggacctgggcatccaggtggataggtacattgcctccgaggtgtgcgaggactccatcaccgtgggaatggtgcgtcatcagggcaagatcatgtacgtgggcgacgtgcggagcgtgacacagaagcatatccaggagtggggccctttcgacctggtgatcggcggcagcccttgcaatgacctgagcatcgtgaacccagcccggaagggcctgtacgagggaaccggcagactgttcttcgagttttacagactgctgcacgacgcccggcctaaggaaggcgacgaccggcccttcttttggctgttcgagaatgtggtggccatgggagtcagcgacaagcgggatattagccggttcctggagagcaaccccgtgatgatcgatgccaaggaagtgagcgccgcccaccgggccagatacttctggggcaatctgcctggcatgaacagacccctggccagcaccgtgaacgacaagctggagctgcaggagtgcctggagcacggccggatcgccaagttcagcaaggtgagaaccatcaccacccgaagcaacagcatcaaacaaggcaaggaccagcactttcctgtgttcatgaacgagaaggaggacatcctgtggtgtaccgagatggagagagtgttcgggttcccagtccactacacagatgtcagcaacatgtctagactggccagacagagactgctgggaagaagctggtccgtccctgtgatcagacacctgttcgcccctctgaaggagtacttcgcctgcgtgagcagcggcaacagcaacgccaacagccggggccccagcttctctagcggcctggtgccactgtccctgagagggagccacatgggccccatggagatctacaaaaccgtgagcgcctggaagcggcagcctgtgcgcgtgctgagcctgtttcggaatatcgataaagtcctgaaaagcctgggattcctggagagcggctctggctccggcggtggcaccctgaagtacgtggaggatgtgacaaacgtggtcagacgggatgtggagaagtggggccccttcgatctggtgtacggcagcacccaacccctgggcagctcttgtgaccggtgccctggctggtacatgtttcagttccaccggatcctgcagtacgccctgccgagacaggagtcccagcggccattcttttggattttcatggacaacttgctgctgaccgaggatgaccaggaaactaccactcggttcctgcagaccgaagccgtgaccctgcaggacgtgagaggccgggactaccagaacgccatgcgggtgtggtccaacatccctggactgaaaagcaagcacgcacctctgacccctaaagaagaggagtacctgcaggcccaggtgcggagcagaagcaagctggacgcccctaaggtggatctgctggtgaagaattgcctcctgcccctgagagagtacttcaagtatttcagccagaatagtctgcccctgggaggcagcggcggcggcgccctggtgacatttgaggacgtcgccgtgcggttcacccaggaggaatgggctctgctggatccttctcagaaaatcctgtaccgggacgtgatgagagagacataccggaatctgacctccgtgggcatcaactgggaatgttgggaccttgaagcctgcttcagaagcctgggaagaaacctgagagtgcaggtggtgaagagaaagtgcgagctgaccaacagcggcccctgcgccgagggcggcccaagcagcggcgcccctcctcccagcggcggcagcccagccggctccccaacctctaccgaggagggcacctctgagtccgccacccccgagagcggccctggcacctccaccgagcccagcgagggcagcgcacccggcagccctgccggcagccccacctccacagaggagggaaccagcaccgagcccagcgaaggcagcgccccaggcaccagcaccgagcctagtgagcaggagattaaacggatcaacaagatcagaagaagacttgtgaaagacagcaacaccaagaaggccggcaagacaggccccatgaaaaccctgctggttagagtgatgacacccgatctgagagagcggctggaaaacctgagaaagaagcctgaaaatatcccccagcccatcagcaatacatctagagccaacctgaataagctgctgaccgattacaccgaaatgaagaaggcgatcctgcatgtgtactgggaagagttccagaaggaccctgtgggcctgatgagccgggtggcccagcctgccagcaagaagatcgatcagaacaagctgaaacctgagatggacgagaagggcaacctgaccaccgccggctttgcctgctctcagtgtggccagcccctgttcgtgtacaagctggagcaggtgtctgagaagggcaaggcttacaccaactacttcggacggtgcaatgtggccgagcacgaaaagctgatcctgctggcccagctgaagcccgagaaggatagcgacgaagccgtgacatatagcctgggaaagtttgggcagagggccctggatttctacagcattcatgtgaccaaggagtccacccaccccgtgaagcccctggcccagatcgccggaaacagatacgcctccggacctgtgggaaaggccctgagcgacgcatgtatgggcacaatcgcctccttcctgtctaagtaccaggacatcatcatcgaacaccagaaggtggtgaagggcaaccagaagagactggagagcctgcgggagctggccggcaaggaaaacctggaataccctagcgtgaccctgccacctcagcctcacaccaaggagggcgttgatgcctacaacgaagtgatcgcccgggtgcgaatgtgggtgaacctgaacctgtggcagaagctgaagctaagcagagatgatgccaagcctctgctgagactgaagggattcccttcctttcctctggtcgagagacaggccaacgaagtggactggtgggacatggtgtgtaacgtgaagaagctgatcaacgagaaaaaggaggatggcaaggtgttttggcagaatctggctggctacaagagacaggaagccctgagaccatacctgagcagcgaggaagatcggaagaagggaaagaaattcgctcggtaccagctgggcgacctgctgctgcacctggaaaagaagcacggcgaggactggggaaaggtgtacgacgaggcctgggagcggattgacaagaaagtggaaggcctgagcaagcacatcaagctggaagaggaacggagaagcgaggacgcccagagcaaggccgccctgaccgactggctgcgggctaaggccagcttcgtgatcgagggcctgaaggaggccgacaaggacgagttctgcagatgcgagctgaagctgcagaagtggtacggggacctgcggggaaagcccttcgccatcgaagccgagaacagcatcctggacatcagcggcttcagcaagcagtacaactgtgccttcatctggcagaaggacggcgtgaagaagctgaacctgtacctgatcatcaactacttcaagggcggcaagctgcggttcaagaagatcaaacctgaagccttcgaagccaacagattctacaccgtgatcaacaaaaagagcggcgagatcgtgcccatggaggtgaacttcaacttcgacgaccccaacctgatcatcctgcctctggcctttggcaagagacagggcagagaattcatctggaacgacctgctgtccctggaaaccggcagcctgaagctggccaacggaagagtgatcgagaagacactgtacaacagaagaacccggcaggatgagcctgccctgttcgtggccctgaccttcgagcggcgggaggtcctggactcctccaatatcaaaccaatgaacctgatcggcgtggcaagaggcgaaaacatccccgccgtgatcgccctgaccgaccccgagggctgcccactgagccggtttaaggatagcctgggaaacccaacccacatcctgagaatcggcgagagctataaggagaagcagcggaccatccaggccaagaaggaggtggagcagcggagagccggcggctacagccggaagtacgccagcaaagccaagaatctggcagacgatatggtgagaaacaccgctagagatctgctgtactacgccgtgacccaggatgccatgctgatcttcgccaacctgagccggggcttcggccggcagggcaagcggaccttcatggccgagagacagtacacacggatggaggactggctgaccgccaagctggcctacgagggcctgagcaagacctacctgtccaagacactggcccagtacacctccaagacatgcagcaactgtgggtttaccatcaccagcgccgactacgacagggtgctggagaagctgaagaagacagcaacaggctggatgaccacaattaacggcaaggagctgaaggtggagggccagattacctactacaacagatacaagagacagaacgtagtcaaggacctgtccgtcgagctggatagactgagcgaagaatctgtgaacaacgacatctcctcctggacaaagggcagaagcggagaagctctgagcctcctgaagaaaagattctcccatagacccgtgcaggagaagttcgtgtgcctgaactgcggcttcgagacacacgcagccgagcaagccgccctgaacatcgccagatcctggctgttcctgcggagccaggagtacaagaaataccagacaaacaagacaaccggcaacaccgataagagagccttcgtcgagacctggcagtccttttaccggaagaagcttaaggaggtgtggaaacctgccgtgcggtctggcggatctggcggaggctcctctcaggagagcgtggccttcgaggacgtggccgtctacttcaccaccaaagagtgggccatcatggtgcccgccgagagagccctgtacagagatgtgatgctggaaaactacgaggccgtggcttttgtggccgtgcctcctacaagcaagcccgctctggtgtcccacctggaacagggcaaggaaagctgcttcatccggcctccaggcgtgctgagcagaagcgactggcgggccggaggcggcccaagcagcggcgcccctcctcccagcggcggcagcccagccggctccccaacctctaccgaggagggcacctctgagtccgccacccccgagagcggccctggcacctccaccgagcccagcgagggcagcgcacccggcagccctgccggcagccccacctccacagaggagggaaccagcaccgagcccagcgaaggcagcgccccaggcaccagcaccgagcctagtgagcaggagattaaacggatcaacaagatcagaagaagacttgtgaaagacagcaacaccaagaaggccggcaagacaggccccatgaaaaccctgctggttagagtgatgacacccgatctgagagagcggctggaaaacctgagaaagaagcctgaaaatatcccccagcccatcagcaatacatctagagccaacctgaataagctgctgaccgattacaccgaaatgaagaaggcgatcctgcatgtgtactgggaagagttccagaaggaccctgtgggcctgatgagccgggtggcccagcctgccagcaagaagatcgatcagaacaagctgaaacctgagatggacgagaagggcaacctgaccaccgccggctttgcctgctctcagtgtggccagcccctgttcgtgtacaagctggagcaggtgtctgagaagggcaaggcttacaccaactacttcggacggtgcaatgtggccgagcacgaaaagctgatcctgctggcccagctgaagcccgagaaggatagcgacgaagccgtgacatatagcctgggaaagtttgggcagagggccctggatttctacagcattcatgtgaccaaggagtccacccaccccgtgaagcccctggcccagatcgccggaaacagatacgcctccggacctgtgggaaaggccctgagcgacgcatgtatgggcacaatcgcctccttcctgtctaagtaccaggacatcatcatcgaacaccagaaggtggtgaagggcaaccagaagagactggagagcctgcgggagctggccggcaaggaaaacctggaataccctagcgtgaccctgccacctcagcctcacaccaaggagggcgttgatgcctacaacgaagtgatcgcccgggtgcgaatgtgggtgaacctgaacctgtggcagaagctgaagctaagcagagatgatgccaagcctctgctgagactgaagggattcccttcctttcctctggtcgagagacaggccaacgaagtggactggtgggacatggtgtgtaacgtgaagaagctgatcaacgagaaaaaggaggatggcaaggtgttttggcagaatctggctggctacaagagacaggaagccctgagaccatacctgagcagcgaggaagatcggaagaagggaaagaaattcgctcggtaccagctgggcgacctgctgctgcacctggaaaagaagcacggcgaggactggggaaaggtgtacgacgaggcctgggagcggattgacaagaaagtggaaggcctgagcaagcacatcaagctggaagaggaacggagaagcgaggacgcccagagcaaggccgccctgaccgactggctgcgggctaaggccagcttcgtgatcgagggcctgaaggaggccgacaaggacgagttctgcagatgcgagctgaagctgcagaagtggtacggggacctgcggggaaagcccttcgccatcgaagccgagaacagcatcctggacatcagcggcttcagcaagcagtacaactgtgccttcatctggcagaaggacggcgtgaagaagctgaacctgtacctgatcatcaactacttcaagggcggcaagctgcggttcaagaagatcaaacctgaagccttcgaagccaacagattctacaccgtgatcaacaaaaagagcggcgagatcgtgcccatggaggtgaacttcaacttcgacgaccccaacctgatcatcctgcctctggcctttggcaagagacagggcagagaattcatctggaacgacctgctgtccctggaaaccggcagcctgaagctggccaacggaagagtgatcgagaagacactgtacaacagaagaacccggcaggatgagcctgccctgttcgtggccctgaccttcgagcggcgggaggtcctggactcctccaatatcaaaccaatgaacctgatcggcgtggcaagaggcgaaaacatccccgccgtgatcgccctgaccgaccccgagggctgcccactgagccggtttaaggatagcctgggaaacccaacccacatcctgagaatcggcgagagctataaggagaagcagcggaccatccaggccaagaaggaggtggagcagcggagagccggcggctacagccggaagtacgccagcaaagccaagaatctggcagacgatatggtgagaaacaccgctagagatctgctgtactacgccgtgacccaggatgccatgctgatcttcgccaacctgagccggggcttcggccggcagggcaagcggaccttcatggccgagagacagtacacacggatggaggactggctgaccgccaagctggcctacgagggcctgagcaagacctacctgtccaagacactggcccagtacacctccaagacatgcagcaactgtgggtttaccatcaccagcgccgactacgacagggtgctggagaagctgaagaagacagcaacaggctggatgaccacaattaacggcaaggagctgaaggtggagggccagattacctactacaacagatacaagagacagaacgtagtcaaggacctgtccgtcgagctggatagactgagcgaagaatctgtgaacaacgacatctcctcctggacaaagggcagaagcggagaagctctgagcctcctgaagaaaagattctcccatagacccgtgcaggagaagttcgtgtgcctgaactgcggcttcgagacacacgcagccgagcaagccgccctgaacatcgccagatcctggctgttcctgcggagccaggagtacaagaaataccagacaaacaagacaaccggcaacaccgataagagagccttcgtcgagacctggcagtccttttaccggaagaagcttaaggaggtgtggaaacctgccgtgcggtctggcggatctggcggaggctcctgccctggtgacatttgaggacgtcgccgtgcggttcacccaggaggaatgggctctgctggatccttctcagaaaatcctgtaccgggacgtgatgagagagacataccggaatctgacctccgtgggcatcaactgggaatgttgggaccttgaagcctgcttcagaagcctgggaagaaacctgagagtgcaggtggtgaagagaaagtgcgagctgaccaacagcggcccctgcgccgagggatctggctccggcagcggccccaagaaaaagagaaaagtctaagctgccttctgcggggcttgccttctggccatgcccttcttctctcccttgcacctgtacctcttggtctttgaataaagcctgagtaggaaggctagcaaaaaaaaaaaaaaaaaaaaaaaaaaaaaaaaaaaaaaaaaaaaaaaaaaaaaaaaaaaaaaaaaaaaaaaaaaaaaaaa

SEQ ID NO: 18532 - RNA, 9485 nt, synthetic construct
  source 1..9485: mol_type = other RNA
aggaaataagagagaaaagaagagtaagaagaaatataagagccaccatggcccctaagaagaagcgtaaagtgagccggatggaacgcctcgtctacgaggtgcggcagaagtgcagaaacatcgaggacatctgcatctcctgcggatctctgaacgtgaccctggagcacccactgttcatcggcggcatgtgccagaactgtaaaaactgttttctggagtgtgcctatcaatacgacgatgacggctaccagagctactgcaccatctgttgcggcggaagagaggtgctgatgtgtggaaataacaactgctgccggtgcttctgcgtggaatgcgtggacctgctggtgggccccggcgccgcccaggccgctattaaggaagatccttggaactgctacatgtgcggccacaagggcacatacggcctgctgagacggagagaggactggcctagcagactgcagatgttcttcgccaataaccacgaccaggagttcgacccccctaaggtgtaccctcccgtccccgccgagaagagaaagcccatccgggtcctgagcctgttcgatggcatcgccaccggtctgctggtgctgaaggacctgggcatccaggtggataggtacattgcctccgaggtgtgcgaggactccatcaccgtgggaatggtgcgtcatcagggcaagatcatgtacgtgggcgacgtgcggagcgtgacacagaagcatatccaggagtggggccctttcgacctggtgatcggcggcagcccttgcaatgacctgagcatcgtgaacccagcccggaagggcctgtacgagggaaccggcagactgttcttcgagttttacagactgctgcacgacgcccggcctaaggaaggcgacgaccggcccttcttttggctgttcgagaatgtggtggccatgggagtcagcgacaagcgggatattagccggttcctggagagcaaccccgtgatgatcgatgccaaggaagtgagcgccgcccaccgggccagatacttctggggcaatctgcctggcatgaacagacccctggccagcaccgtgaacgacaagctggagctgcaggagtgcctggagcacggccggatcgccaagttcagcaaggtgagaaccatcaccacccgaagcaacagcatcaaacaaggcaaggaccagcactttcctgtgttcatgaacgagaaggaggacatcctgtggtgtaccgagatggagagagtgttcgggttcccagtccactacacagatgtcagcaacatgtctagactggccagacagagactgctgggaagaagctggtccgtccctgtgatcagacacctgttcgcccctctgaaggagtacttcgcctgcgtgagcagcggcaacagcaacgccaacagccggggccccagcttctctagcggcctggtgccactgtccctgagagggagccacatgggccccatggagatctacaaaaccgtgagcgcctggaagcggcagcctgtgcgcgtgctgagcctgtttcggaatatcgataaagtcctgaaaagcctgggattcctggagagcggctctggctccggcggtggcaccctgaagtacgtggaggatgtgacaaacgtggtcagacgggatgtggagaagtggggccccttcgatctggtgtacggcagcacccaacccctgggcagctcttgtgaccggtgccctggctggtacatgtttcagttccaccggatcctgcagtacgccctgccgagacaggagtcccagcggccattcttttggattttcatggacaacttgctgctgaccgaggatgaccaggaaactaccactcggttcctgcagaccgaagccgtgaccctgcaggacgtgagaggccgggactaccagaacgccatgcgggtgtggtccaacatccctggactgaaaagcaagcacgcacctctgacccctaaagaagaggagtacctgcaggcccaggtgcggagcagaagcaagctggacgcccctaaggtggatctgctggtgaagaattgcctcctgcccctgagagagtacttcaagtatttcagccagaatagtctgcccctgggaggcagcggcggcggcgccctggtgacatttgaggacgtcgccgtgcggttcacccaggaggaatgggctctgctggatccttctcagaaaatcctgtaccgggacgtgatgagagagacataccggaatctgacctccgtgggcatcaactgggaatgttgggaccttgaagcctgcttcagaagcctgggaagaaacctgagagtgcaggtggtgaagagaaagtgcgagctgaccaacagcggcccctgcgccgagggcggcccaagcagcggcgcccctcctcccagcggcggcagcccagccggctccccaacctctaccgaggagggcacctctgagtccgccacccccgagagcggccctggcacctccaccgagcccagcgagggcagcgcacccggcagccctgccggcagccccacctccacagaggagggaaccagcaccgagcccagcgaaggcagcgccccaggcaccagcaccgagcctagtgagcaggagattaaacggatcaacaagatcagaagaagacttgtgaaagacagcaacaccaagaaggccggcaagacaggccccatgaaaaccctgctggttagagtgatgacacccgatctgagagagcggctggaaaacctgagaaagaagcctgaaaatatcccccagcccatcagcaatacatctagagccaacctgaataagctgctgaccgattacaccgaaatgaagaaggcgatcctgcatgtgtactgggaagagttccagaaggaccctgtgggcctgatgagccgggtggcccagcctgccagcaagaagatcgatcagaacaagctgaaacctgagatggacgagaagggcaacctgaccaccgccggctttgcctgctctcagtgtggccagcccctgttcgtgtacaagctggagcaggtgtctgagaagggcaaggcttacaccaactacttcggacggtgcaatgtggccgagcacgaaaagctgatcctgctggcccagctgaagcccgagaaggatagcgacgaagccgtgacatatagcctgggaaagtttgggcagagggccctggatttctacagcattcatgtgaccaaggagtccacccaccccgtgaagcccctggcccagatcgccggaaacagatacgcctccggacctgtgggaaaggccctgagcgacgcatgtatgggcacaatcgcctccttcctgtctaagtaccaggacatcatcatcgaacaccagaaggtggtgaagggcaaccagaagagactggagagcctgcgggagctggccggcaaggaaaacctggaataccctagcgtgaccctgccacctcagcctcacaccaaggagggcgttgatgcctacaacgaagtgatcgcccgggtgcgaatgtgggtgaacctgaacctgtggcagaagctgaagctaagcagagatgatgccaagcctctgctgagactgaagggattcccttcctttcctctggtcgagagacaggccaacgaagtggactggtgggacatggtgtgtaacgtgaagaagctgatcaacgagaaaaaggaggatggcaaggtgttttggcagaatctggctggctacaagagacaggaagccctgagaccatacctgagcagcgaggaagatcggaagaagggaaagaaattcgctcggtaccagctgggcgacctgctgctgcacctggaaaagaagcacggcgaggactggggaaaggtgtacgacgaggcctgggagcggattgacaagaaagtggaaggcctgagcaagcacatcaagctggaagaggaacggagaagcgaggacgcccagagcaaggccgccctgaccgactggctgcgggctaaggccagcttcgtgatcgagggcctgaaggaggccgacaaggacgagttctgcagatgcgagctgaagctgcagaagtggtacggggacctgcggggaaagcccttcgccatcgaagccgagaacagcatcctggacatcagcggcttcagcaagcagtacaactgtgccttcatctggcagaaggacggcgtgaagaagctgaacctgtacctgatcatcaactacttcaagggcggcaagctgcggttcaagaagatcaaacctgaagccttcgaagccaacagattctacaccgtgatcaacaaaaagagcggcgagatcgtgcccatggaggtgaacttcaacttcgacgaccccaacctgatcatcctgcctctggcctttggcaagagacagggcagagaattcatctggaacgacctgctgtccctggaaaccggcagcctgaagctggccaacggaagagtgatcgagaagacactgtacaacagaagaacccggcaggatgagcctgccctgttcgtggccctgaccttcgagcggcgggaggtcctggactcctccaatatcaaaccaatgaacctgatcggcgtggcaagaggcgaaaacatccccgccgtgatcgccctgaccgaccccgagggctgcccactgagccggtttaaggatagcctgggaaacccaacccacatcctgagaatcggcgagagctataaggagaagcagcggaccatccaggccaagaaggaggtggagcagcggagagccggcggctacagccggaagtacgccagcaaagccaagaatctggcagacgatatggtgagaaacaccgctagagatctgctgtactacgccgtgacccaggatgccatgctgatcttcgccaacctgagccggggcttcggccggcagggcaagcggaccttcatggccgagagacagtacacacggatggaggactggctgaccgccaagctggcctacgagggcctgagcaagacctacctgtccaagacactggcccagtacacctccaagacatgcagcaactgtgggtttaccatcaccagcgccgactacgacagggtgctggagaagctgaagaagacagcaacaggctggatgaccacaattaacggcaaggagctgaaggtggagggccagattacctactacaacagatacaagagacagaacgtagtcaaggacctgtccgtcgagctggatagactgagcgaagaatctgtgaacaacgacatctcctcctggacaaagggcagaagcggagaagctctgagcctcctgaagaaaagattctcccatagacccgtgcaggagaagttcgtgtgcctgaactgcggcttcgagacacacgcagccgagcaagccgccctgaacatcgccagatcctggctgttcctgcggagccaggagtacaagaaataccagacaaacaagacaaccggcaacaccgataagagagccttcgtcgagacctggcagtccttttaccggaagaagcttaaggaggtgtggaaacctgccgtgcggtctggcggatctggcggaggctcctctcaggagagcgtggccttcgaggacgtggccgtctacttcaccaccaaagagtgggccatcatggtgcccgccgagagagccctgtacagagatgtgatgctggaaaactacgaggccgtggcttttgtggccgtgcctcctacaagcaagcccgctctggtgtcccacctggaacagggcaaggaaagctgcttcatccggcctccaggcgtgctgagcagaagcgactggcgggccggaggcggcccaagcagcggcgcccctcctcccagcggcggcagcccagccggctccccaacctctaccgaggagggcacctctgagtccgccacccccgagagcggccctggcacctccaccgagcccagcgagggcagcgcacccggcagccctgccggcagccccacctccacagaggagggaaccagcaccgagcccagcgaaggcagcgccccaggcaccagcaccgagcctagtgagcaggagattaaacggatcaacaagatcagaagaagacttgtgaaagacagcaacaccaagaaggccggcaagacaggccccatgaaaaccctgctggttagagtgatgacacccgatctgagagagcggctggaaaacctgagaaagaagcctgaaaatatcccccagcccatcagcaatacatctagagccaacctgaataagctgctgaccgattacaccgaaatgaagaaggcgatcctgcatgtgtactgggaagagttccagaaggaccctgtgggcctgatgagccgggtggcccagcctgccagcaagaagatcgatcagaacaagctgaaacctgagatggacgagaagggcaacctgaccaccgccggctttgcctgctctcagtgtggccagcccctgttcgtgtacaagctggagcaggtgtctgagaagggcaaggcttacaccaactacttcggacggtgcaatgtggccgagcacgaaaagctgatcctgctggcccagctgaagcccgagaaggatagcgacgaagccgtgacatatagcctgggaaagtttgggcagagggccctggatttctacagcattcatgtgaccaaggagtccacccaccccgtgaagcccctggcccagatcgccggaaacagatacgcctccggacctgtgggaaaggccctgagcgacgcatgtatgggcacaatcgcctccttcctgtctaagtaccaggacatcatcatcgaacaccagaaggtggtgaagggcaaccagaagagactggagagcctgcgggagctggccggcaaggaaaacctggaataccctagcgtgaccctgccacctcagcctcacaccaaggagggcgttgatgcctacaacgaagtgatcgcccgggtgcgaatgtgggtgaacctgaacctgtggcagaagctgaagctaagcagagatgatgccaagcctctgctgagactgaagggattcccttcctttcctctggtcgagagacaggccaacgaagtggactggtgggacatggtgtgtaacgtgaagaagctgatcaacgagaaaaaggaggatggcaaggtgttttggcagaatctggctggctacaagagacaggaagccctgagaccatacctgagcagcgaggaagatcggaagaagggaaagaaattcgctcggtaccagctgggcgacctgctgctgcacctggaaaagaagcacggcgaggactggggaaaggtgtacgacgaggcctgggagcggattgacaagaaagtggaaggcctgagcaagcacatcaagctggaagaggaacggagaagcgaggacgcccagagcaaggccgccctgaccgactggctgcgggctaaggccagcttcgtgatcgagggcctgaaggaggccgacaaggacgagttctgcagatgcgagctgaagctgcagaagtggtacggggacctgcggggaaagcccttcgccatcgaagccgagaacagcatcctggacatcagcggcttcagcaagcagtacaactgtgccttcatctggcagaaggacggcgtgaagaagctgaacctgtacctgatcatcaactacttcaagggcggcaagctgcggttcaagaagatcaaacctgaagccttcgaagccaacagattctacaccgtgatcaacaaaaagagcggcgagatcgtgcccatggaggtgaacttcaacttcgacgaccccaacctgatcatcctgcctctggcctttggcaagagacagggcagagaattcatctggaacgacctgctgtccctggaaaccggcagcctgaagctggccaacggaagagtgatcgagaagacactgtacaacagaagaacccggcaggatgagcctgccctgttcgtggccctgaccttcgagcggcgggaggtcctggactcctccaatatcaaaccaatgaacctgatcggcgtggcaagaggcgaaaacatccccgccgtgatcgccctgaccgaccccgagggctgcccactgagccggtttaaggatagcctgggaaacccaacccacatcctgagaatcggcgagagctataaggagaagcagcggaccatccaggccaagaaggaggtggagcagcggagagccggcggctacagccggaagtacgccagcaaagccaagaatctggcagacgatatggtgagaaacaccgctagagatctgctgtactacgccgtgacccaggatgccatgctgatcttcgccaacctgagccggggcttcggccggcagggcaagcggaccttcatggccgagagacagtacacacggatggaggactggctgaccgccaagctggcctacgagggcctgagcaagacctacctgtccaagacactggcccagtacacctccaagacatgcagcaactgtgggtttaccatcaccagcgccgactacgacagggtgctggagaagctgaagaagacagcaacaggctggatgaccacaattaacggcaaggagctgaaggtggagggccagattacctactacaacagatacaagagacagaacgtagtcaaggacctgtccgtcgagctggatagactgagcgaagaatctgtgaacaacgacatctcctcctggacaaagggcagaagcggagaagctctgagcctcctgaagaaaagattctcccatagacccgtgcaggagaagttcgtgtgcctgaactgcggcttcgagacacacgcagccgagcaagccgccctgaacatcgccagatcctggctgttcctgcggagccaggagtacaagaaataccagacaaacaagacaaccggcaacaccgataagagagccttcgtcgagacctggcagtccttttaccggaagaagcttaaggaggtgtggaaacctgccgtgcggtctggcggatctggcggaggctccttctacacctgtgaccttcgaggatgtggtggtctacttcaccgccgctgagtgggtgcacctgacaaactggcaaagagatttttatcaggccgtgatgatggaaacctacgagctggtggccagcgtggctggcgacggcgttccaatggccgaggacgaggaaggcggagtggaaagacccgtgtggcagtacatccccagaggcaagcggcggagaaagacccctcagcctcgcgccgacggatctggctccggcagcggccccaagaaaaagagaaaagtctaagctgccttctgcggggcttgccttctggccatgcccttcttctctcccttgcacctgtacctcttggtctttgaataaagcctgagtaggaaggctagcaaaaaaaaaaaaaaaaaaaaaaaaaaaaaaaaaaaaaaaaaaaaaaaaaaaaaaaaaaaaaaaaaaaaaaaaaaaaaaaa

SEQ ID NO: 18533 - RNA, 9485 nt, synthetic construct
  source 1..9485: mol_type = other RNA
aggaaataagagagaaaagaagagtaagaagaaatataagagccaccatggcccctaagaagaagcgtaaagtgagccggatggaacgcctcgtctacgaggtgcggcagaagtgcagaaacatcgaggacatctgcatctcctgcggatctctgaacgtgaccctggagcacccactgttcatcggcggcatgtgccagaactgtaaaaactgttttctggagtgtgcctatcaatacgacgatgacggctaccagagctactgcaccatctgttgcggcggaagagaggtgctgatgtgtggaaataacaactgctgccggtgcttctgcgtggaatgcgtggacctgctggtgggccccggcgccgcccaggccgctattaaggaagatccttggaactgctacatgtgcggccacaagggcacatacggcctgctgagacggagagaggactggcctagcagactgcagatgttcttcgccaataaccacgaccaggagttcgacccccctaaggtgtaccctcccgtccccgccgagaagagaaagcccatccgggtcctgagcctgttcgatggcatcgccaccggtctgctggtgctgaaggacctgggcatccaggtggataggtacattgcctccgaggtgtgcgaggactccatcaccgtgggaatggtgcgtcatcagggcaagatcatgtacgtgggcgacgtgcggagcgtgacacagaagcatatccaggagtggggccctttcgacctggtgatcggcggcagcccttgcaatgacctgagcatcgtgaacccagcccggaagggcctgtacgagggaaccggcagactgttcttcgagttttacagactgctgcacgacgcccggcctaaggaaggcgacgaccggcccttcttttggctgttcgagaatgtggtggccatgggagtcagcgacaagcgggatattagccggttcctggagagcaaccccgtgatgatcgatgccaaggaagtgagcgccgcccaccgggccagatacttctggggcaatctgcctggcatgaacagacccctggccagcaccgtgaacgacaagctggagctgcaggagtgcctggagcacggccggatcgccaagttcagcaaggtgagaaccatcaccacccgaagcaacagcatcaaacaaggcaaggaccagcactttcctgtgttcatgaacgagaaggaggacatcctgtggtgtaccgagatggagagagtgttcgggttcccagtccactacacagatgtcagcaacatgtctagactggccagacagagactgctgggaagaagctggtccgtccctgtgatcagacacctgttcgcccctctgaaggagtacttcgcctgcgtgagcagcggcaacagcaacgccaacagccggggccccagcttctctagcggcctggtgccactgtccctgagagggagccacatgggccccatggagatctacaaaaccgtgagcgcctggaagcggcagcctgtgcgcgtgctgagcctgtttcggaatatcgataaagtcctgaaaagcctgggattcctggagagcggctctggctccggcggtggcaccctgaagtacgtggaggatgtgacaaacgtggtcagacgggatgtggagaagtggggccccttcgatctggtgtacggcagcacccaacccctgggcagctcttgtgaccggtgccctggctggtacatgtttcagttccaccggatcctgcagtacgccctgccgagacaggagtcccagcggccattcttttggattttcatggacaacttgctgctgaccgaggatgaccaggaaactaccactcggttcctgcagaccgaagccgtgaccctgcaggacgtgagaggccgggactaccagaacgccatgcgggtgtggtccaacatccctggactgaaaagcaagcacgcacctctgacccctaaagaagaggagtacctgcaggcccaggtgcggagcagaagcaagctggacgcccctaaggtggatctgctggtgaagaattgcctcctgcccctgagagagtacttcaagtatttcagccagaatagtctgcccctgggaggcagcggcggcggcgccctggtgacatttgaggacgtcgccgtgcggttcacccaggaggaatgggctctgctggatccttctcagaaaatcctgtaccgggacgtgatgagagagacataccggaatctgacctccgtgggcatcaactgggaatgttgggaccttgaagcctgcttcagaagcctgggaagaaacctgagagtgcaggtggtgaagagaaagtgcgagctgaccaacagcggcccctgcgccgagggcggcccaagcagcggcgcccctcctcccagcggcggcagcccagccggctccccaacctctaccgaggagggcacctctgagtccgccacccccgagagcggccctggcacctccaccgagcccagcgagggcagcgcacccggcagccctgccggcagccccacctccacagaggagggaaccagcaccgagcccagcgaaggcagcgccccaggcaccagcaccgagcctagtgagcaggagattaaacggatcaacaagatcagaagaagacttgtgaaagacagcaacaccaagaaggccggcaagacaggccccatgaaaaccctgctggttagagtgatgacacccgatctgagagagcggctggaaaacctgagaaagaagcctgaaaatatcccccagcccatcagcaatacatctagagccaacctgaataagctgctgaccgattacaccgaaatgaagaaggcgatcctgcatgtgtactgggaagagttccagaaggaccctgtgggcctgatgagccgggtggcccagcctgccagcaagaagatcgatcagaacaagctgaaacctgagatggacgagaagggcaacctgaccaccgccggctttgcctgctctcagtgtggccagcccctgttcgtgtacaagctggagcaggtgtctgagaagggcaaggcttacaccaactacttcggacggtgcaatgtggccgagcacgaaaagctgatcctgctggcccagctgaagcccgagaaggatagcgacgaagccgtgacatatagcctgggaaagtttgggcagagggccctggatttctacagcattcatgtgaccaaggagtccacccaccccgtgaagcccctggcccagatcgccggaaacagatacgcctccggacctgtgggaaaggccctgagcgacgcatgtatgggcacaatcgcctccttcctgtctaagtaccaggacatcatcatcgaacaccagaaggtggtgaagggcaaccagaagagactggagagcctgcgggagctggccggcaaggaaaacctggaataccctagcgtgaccctgccacctcagcctcacaccaaggagggcgttgatgcctacaacgaagtgatcgcccgggtgcgaatgtgggtgaacctgaacctgtggcagaagctgaagctaagcagagatgatgccaagcctctgctgagactgaagggattcccttcctttcctctggtcgagagacaggccaacgaagtggactggtgggacatggtgtgtaacgtgaagaagctgatcaacgagaaaaaggaggatggcaaggtgttttggcagaatctggctggctacaagagacaggaagccctgagaccatacctgagcagcgaggaagatcggaagaagggaaagaaattcgctcggtaccagctgggcgacctgctgctgcacctggaaaagaagcacggcgaggactggggaaaggtgtacgacgaggcctgggagcggattgacaagaaagtggaaggcctgagcaagcacatcaagctggaagaggaacggagaagcgaggacgcccagagcaaggccgccctgaccgactggctgcgggctaaggccagcttcgtgatcgagggcctgaaggaggccgacaaggacgagttctgcagatgcgagctgaagctgcagaagtggtacggggacctgcggggaaagcccttcgccatcgaagccgagaacagcatcctggacatcagcggcttcagcaagcagtacaactgtgccttcatctggcagaaggacggcgtgaagaagctgaacctgtacctgatcatcaactacttcaagggcggcaagctgcggttcaagaagatcaaacctgaagccttcgaagccaacagattctacaccgtgatcaacaaaaagagcggcgagatcgtgcccatggaggtgaacttcaacttcgacgaccccaacctgatcatcctgcctctggcctttggcaagagacagggcagagaattcatctggaacgacctgctgtccctggaaaccggcagcctgaagctggccaacggaagagtgatcgagaagacactgtacaacagaagaacccggcaggatgagcctgccctgttcgtggccctgaccttcgagcggcgggaggtcctggactcctccaatatcaaaccaatgaacctgatcggcgtggcaagaggcgaaaacatccccgccgtgatcgccctgaccgaccccgagggctgcccactgagccggtttaaggatagcctgggaaacccaacccacatcctgagaatcggcgagagctataaggagaagcagcggaccatccaggccaagaaggaggtggagcagcggagagccggcggctacagccggaagtacgccagcaaagccaagaatctggcagacgatatggtgagaaacaccgctagagatctgctgtactacgccgtgacccaggatgccatgctgatcttcgccaacctgagccggggcttcggccggcagggcaagcggaccttcatggccgagagacagtacacacggatggaggactggctgaccgccaagctggcctacgagggcctgagcaagacctacctgtccaagacactggcccagtacacctccaagacatgcagcaactgtgggtttaccatcaccagcgccgactacgacagggtgctggagaagctgaagaagacagcaacaggctggatgaccacaattaacggcaaggagctgaaggtggagggccagattacctactacaacagatacaagagacagaacgtagtcaaggacctgtccgtcgagctggatagactgagcgaagaatctgtgaacaacgacatctcctcctggacaaagggcagaagcggagaagctctgagcctcctgaagaaaagattctcccatagacccgtgcaggagaagttcgtgtgcctgaactgcggcttcgagacacacgcagccgagcaagccgccctgaacatcgccagatcctggctgttcctgcggagccaggagtacaagaaataccagacaaacaagacaaccggcaacaccgataagagagccttcgtcgagacctggcagtccttttaccggaagaagcttaaggaggtgtggaaacctgccgtgcggtctggcggatctggcggaggctcctctcaggagagcgtggccttcgaggacgtggccgtctacttcaccaccaaagagtgggccatcatggtgcccgccgagagagccctgtacagagatgtgatgctggaaaactacgaggccgtggcttttgtggccgtgcctcctacaagcaagcccgctctggtgtcccacctggaacagggcaaggaaagctgcttcatccggcctccaggcgtgctgagcagaagcgactggcgggccggaggcggcccaagcagcggcgcccctcctcccagcggcggcagcccagccggctccccaacctctaccgaggagggcacctctgagtccgccacccccgagagcggccctggcacctccaccgagcccagcgagggcagcgcacccggcagccctgccggcagccccacctccacagaggagggaaccagcaccgagcccagcgaaggcagcgccccaggcaccagcaccgagcctagtgagcaggagattaaacggatcaacaagatcagaagaagacttgtgaaagacagcaacaccaagaaggccggcaagacaggccccatgaaaaccctgctggttagagtgatgacacccgatctgagagagcggctggaaaacctgagaaagaagcctgaaaatatcccccagcccatcagcaatacatctagagccaacctgaataagctgctgaccgattacaccgaaatgaagaaggcgatcctgcatgtgtactgggaagagttccagaaggaccctgtgggcctgatgagccgggtggcccagcctgccagcaagaagatcgatcagaacaagctgaaacctgagatggacgagaagggcaacctgaccaccgccggctttgcctgctctcagtgtggccagcccctgttcgtgtacaagctggagcaggtgtctgagaagggcaaggcttacaccaactacttcggacggtgcaatgtggccgagcacgaaaagctgatcctgctggcccagctgaagcccgagaaggatagcgacgaagccgtgacatatagcctgggaaagtttgggcagagggccctggatttctacagcattcatgtgaccaaggagtccacccaccccgtgaagcccctggcccagatcgccggaaacagatacgcctccggacctgtgggaaaggccctgagcgacgcatgtatgggcacaatcgcctccttcctgtctaagtaccaggacatcatcatcgaacaccagaaggtggtgaagggcaaccagaagagactggagagcctgcgggagctggccggcaaggaaaacctggaataccctagcgtgaccctgccacctcagcctcacaccaaggagggcgttgatgcctacaacgaagtgatcgcccgggtgcgaatgtgggtgaacctgaacctgtggcagaagctgaagctaagcagagatgatgccaagcctctgctgagactgaagggattcccttcctttcctctggtcgagagacaggccaacgaagtggactggtgggacatggtgtgtaacgtgaagaagctgatcaacgagaaaaaggaggatggcaaggtgttttggcagaatctggctggctacaagagacaggaagccctgagaccatacctgagcagcgaggaagatcggaagaagggaaagaaattcgctcggtaccagctgggcgacctgctgctgcacctggaaaagaagcacggcgaggactggggaaaggtgtacgacgaggcctgggagcggattgacaagaaagtggaaggcctgagcaagcacatcaagctggaagaggaacggagaagcgaggacgcccagagcaaggccgccctgaccgactggctgcgggctaaggccagcttcgtgatcgagggcctgaaggaggccgacaaggacgagttctgcagatgcgagctgaagctgcagaagtggtacggggacctgcggggaaagcccttcgccatcgaagccgagaacagcatcctggacatcagcggcttcagcaagcagtacaactgtgccttcatctggcagaaggacggcgtgaagaagctgaacctgtacctgatcatcaactacttcaagggcggcaagctgcggttcaagaagatcaaacctgaagccttcgaagccaacagattctacaccgtgatcaacaaaaagagcggcgagatcgtgcccatggaggtgaacttcaacttcgacgaccccaacctgatcatcctgcctctggcctttggcaagagacagggcagagaattcatctggaacgacctgctgtccctggaaaccggcagcctgaagctggccaacggaagagtgatcgagaagacactgtacaacagaagaacccggcaggatgagcctgccctgttcgtggccctgaccttcgagcggcgggaggtcctggactcctccaatatcaaaccaatgaacctgatcggcgtggcaagaggcgaaaacatccccgccgtgatcgccctgaccgaccccgagggctgcccactgagccggtttaaggatagcctgggaaacccaacccacatcctgagaatcggcgagagctataaggagaagcagcggaccatccaggccaagaaggaggtggagcagcggagagccggcggctacagccggaagtacgccagcaaagccaagaatctggcagacgatatggtgagaaacaccgctagagatctgctgtactacgccgtgacccaggatgccatgctgatcttcgccaacctgagccggggcttcggccggcagggcaagcggaccttcatggccgagagacagtacacacggatggaggactggctgaccgccaagctggcctacgagggcctgagcaagacctacctgtccaagacactggcccagtacacctccaagacatgcagcaactgtgggtttaccatcaccagcgccgactacgacagggtgctggagaagctgaagaagacagcaacaggctggatgaccacaattaacggcaaggagctgaaggtggagggccagattacctactacaacagatacaagagacagaacgtagtcaaggacctgtccgtcgagctggatagactgagcgaagaatctgtgaacaacgacatctcctcctggacaaagggcagaagcggagaagctctgagcctcctgaagaaaagattctcccatagacccgtgcaggagaagttcgtgtgcctgaactgcggcttcgagacacacgcagccgagcaagccgccctgaacatcgccagatcctggctgttcctgcggagccaggagtacaagaaataccagacaaacaagacaaccggcaacaccgataagagagccttcgtcgagacctggcagtccttttaccggaagaagcttaaggaggtgtggaaacctgccgtgcggtctggcggatctggcggaggctcctcaggacgtggtgacattcaaggacgtcgccatctacttcagccctgaggaatgggtgcggctgagcgccggacagagagaactgtaccaggaggtgatgctggacaactacgagctggtgaccagcctggatagagagagcaaactgctgtataagatggaccccgaggaagaaagctgcgagggcgtgccatacagctctgccgacagcggcgcccctgatagctcctccacctctgcttgtggatctggctccggcagcggccccaagaaaaagagaaaagtctaagctgccttctgcggggcttgccttctggccatgcccttcttctctcccttgcacctgtacctcttggtctttgaataaagcctgagtaggaaggctagcaaaaaaaaaaaaaaaaaaaaaaaaaaaaaaaaaaaaaaaaaaaaaaaaaaaaaaaaaaaaaaaaaaaaaaaaaaaaaaaa

SEQ ID NO: 18534 - RNA, 9512 nt, synthetic construct
  source 1..9512: mol_type = other RNA
aggaaataagagagaaaagaagagtaagaagaaatataagagccaccatggcccctaagaagaagcgtaaagtgagccggatggaacgcctcgtctacgaggtgcggcagaagtgcagaaacatcgaggacatctgcatctcctgcggatctctgaacgtgaccctggagcacccactgttcatcggcggcatgtgccagaactgtaaaaactgttttctggagtgtgcctatcaatacgacgatgacggctaccagagctactgcaccatctgttgcggcggaagagaggtgctgatgtgtggaaataacaactgctgccggtgcttctgcgtggaatgcgtggacctgctggtgggccccggcgccgcccaggccgctattaaggaagatccttggaactgctacatgtgcggccacaagggcacatacggcctgctgagacggagagaggactggcctagcagactgcagatgttcttcgccaataaccacgaccaggagttcgacccccctaaggtgtaccctcccgtccccgccgagaagagaaagcccatccgggtcctgagcctgttcgatggcatcgccaccggtctgctggtgctgaaggacctgggcatccaggtggataggtacattgcctccgaggtgtgcgaggactccatcaccgtgggaatggtgcgtcatcagggcaagatcatgtacgtgggcgacgtgcggagcgtgacacagaagcatatccaggagtggggccctttcgacctggtgatcggcggcagcccttgcaatgacctgagcatcgtgaacccagcccggaagggcctgtacgagggaaccggcagactgttcttcgagttttacagactgctgcacgacgcccggcctaaggaaggcgacgaccggcccttcttttggctgttcgagaatgtggtggccatgggagtcagcgacaagcgggatattagccggttcctggagagcaaccccgtgatgatcgatgccaaggaagtgagcgccgcccaccgggccagatacttctggggcaatctgcctggcatgaacagacccctggccagcaccgtgaacgacaagctggagctgcaggagtgcctggagcacggccggatcgccaagttcagcaaggtgagaaccatcaccacccgaagcaacagcatcaaacaaggcaaggaccagcactttcctgtgttcatgaacgagaaggaggacatcctgtggtgtaccgagatggagagagtgttcgggttcccagtccactacacagatgtcagcaacatgtctagactggccagacagagactgctgggaagaagctggtccgtccctgtgatcagacacctgttcgcccctctgaaggagtacttcgcctgcgtgagcagcggcaacagcaacgccaacagccggggccccagcttctctagcggcctggtgccactgtccctgagagggagccacatgggccccatggagatctacaaaaccgtgagcgcctggaagcggcagcctgtgcgcgtgctgagcctgtttcggaatatcgataaagtcctgaaaagcctgggattcctggagagcggctctggctccggcggtggcaccctgaagtacgtggaggatgtgacaaacgtggtcagacgggatgtggagaagtggggccccttcgatctggtgtacggcagcacccaacccctgggcagctcttgtgaccggtgccctggctggtacatgtttcagttccaccggatcctgcagtacgccctgccgagacaggagtcccagcggccattcttttggattttcatggacaacttgctgctgaccgaggatgaccaggaaactaccactcggttcctgcagaccgaagccgtgaccctgcaggacgtgagaggccgggactaccagaacgccatgcgggtgtggtccaacatccctggactgaaaagcaagcacgcacctctgacccctaaagaagaggagtacctgcaggcccaggtgcggagcagaagcaagctggacgcccctaaggtggatctgctggtgaagaattgcctcctgcccctgagagagtacttcaagtatttcagccagaatagtctgcccctgggaggcagcggcggcggcgccctggtgacatttgaggacgtcgccgtgcggttcacccaggaggaatgggctctgctggatccttctcagaaaatcctgtaccgggacgtgatgagagagacataccggaatctgacctccgtgggcatcaactgggaatgttgggaccttgaagcctgcttcagaagcctgggaagaaacctgagagtgcaggtggtgaagagaaagtgcgagctgaccaacagcggcccctgcgccgagggcggcccaagcagcggcgcccctcctcccagcggcggcagcccagccggctccccaacctctaccgaggagggcacctctgagtccgccacccccgagagcggccctggcacctccaccgagcccagcgagggcagcgcacccggcagccctgccggcagccccacctccacagaggagggaaccagcaccgagcccagcgaaggcagcgccccaggcaccagcaccgagcctagtgagcaggagattaaacggatcaacaagatcagaagaagacttgtgaaagacagcaacaccaagaaggccggcaagacaggccccatgaaaaccctgctggttagagtgatgacacccgatctgagagagcggctggaaaacctgagaaagaagcctgaaaatatcccccagcccatcagcaatacatctagagccaacctgaataagctgctgaccgattacaccgaaatgaagaaggcgatcctgcatgtgtactgggaagagttccagaaggaccctgtgggcctgatgagccgggtggcccagcctgccagcaagaagatcgatcagaacaagctgaaacctgagatggacgagaagggcaacctgaccaccgccggctttgcctgctctcagtgtggccagcccctgttcgtgtacaagctggagcaggtgtctgagaagggcaaggcttacaccaactacttcggacggtgcaatgtggccgagcacgaaaagctgatcctgctggcccagctgaagcccgagaaggatagcgacgaagccgtgacatatagcctgggaaagtttgggcagagggccctggatttctacagcattcatgtgaccaaggagtccacccaccccgtgaagcccctggcccagatcgccggaaacagatacgcctccggacctgtgggaaaggccctgagcgacgcatgtatgggcacaatcgcctccttcctgtctaagtaccaggacatcatcatcgaacaccagaaggtggtgaagggcaaccagaagagactggagagcctgcgggagctggccggcaaggaaaacctggaataccctagcgtgaccctgccacctcagcctcacaccaaggagggcgttgatgcctacaacgaagtgatcgcccgggtgcgaatgtgggtgaacctgaacctgtggcagaagctgaagctaagcagagatgatgccaagcctctgctgagactgaagggattcccttcctttcctctggtcgagagacaggccaacgaagtggactggtgggacatggtgtgtaacgtgaagaagctgatcaacgagaaaaaggaggatggcaaggtgttttggcagaatctggctggctacaagagacaggaagccctgagaccatacctgagcagcgaggaagatcggaagaagggaaagaaattcgctcggtaccagctgggcgacctgctgctgcacctggaaaagaagcacggcgaggactggggaaaggtgtacgacgaggcctgggagcggattgacaagaaagtggaaggcctgagcaagcacatcaagctggaagaggaacggagaagcgaggacgcccagagcaaggccgccctgaccgactggctgcgggctaaggccagcttcgtgatcgagggcctgaaggaggccgacaaggacgagttctgcagatgcgagctgaagctgcagaagtggtacggggacctgcggggaaagcccttcgccatcgaagccgagaacagcatcctggacatcagcggcttcagcaagcagtacaactgtgccttcatctggcagaaggacggcgtgaagaagctgaacctgtacctgatcatcaactacttcaagggcggcaagctgcggttcaagaagatcaaacctgaagccttcgaagccaacagattctacaccgtgatcaacaaaaagagcggcgagatcgtgcccatggaggtgaacttcaacttcgacgaccccaacctgatcatcctgcctctggcctttggcaagagacagggcagagaattcatctggaacgacctgctgtccctggaaaccggcagcctgaagctggccaacggaagagtgatcgagaagacactgtacaacagaagaacccggcaggatgagcctgccctgttcgtggccctgaccttcgagcggcgggaggtcctggactcctccaatatcaaaccaatgaacctgatcggcgtggcaagaggcgaaaacatccccgccgtgatcgccctgaccgaccccgagggctgcccactgagccggtttaaggatagcctgggaaacccaacccacatcctgagaatcggcgagagctataaggagaagcagcggaccatccaggccaagaaggaggtggagcagcggagagccggcggctacagccggaagtacgccagcaaagccaagaatctggcagacgatatggtgagaaacaccgctagagatctgctgtactacgccgtgacccaggatgccatgctgatcttcgccaacctgagccggggcttcggccggcagggcaagcggaccttcatggccgagagacagtacacacggatggaggactggctgaccgccaagctggcctacgagggcctgagcaagacctacctgtccaagacactggcccagtacacctccaagacatgcagcaactgtgggtttaccatcaccagcgccgactacgacagggtgctggagaagctgaagaagacagcaacaggctggatgaccacaattaacggcaaggagctgaaggtggagggccagattacctactacaacagatacaagagacagaacgtagtcaaggacctgtccgtcgagctggatagactgagcgaagaatctgtgaacaacgacatctcctcctggacaaagggcagaagcggagaagctctgagcctcctgaagaaaagattctcccatagacccgtgcaggagaagttcgtgtgcctgaactgcggcttcgagacacacgcagccgagcaagccgccctgaacatcgccagatcctggctgttcctgcggagccaggagtacaagaaataccagacaaacaagacaaccggcaacaccgataagagagccttcgtcgagacctggcagtccttttaccggaagaagcttaaggaggtgtggaaacctgccgtgcggtctggcggatctggcggaggctcctctcaggagagcgtggccttcgaggacgtggccgtctacttcaccaccaaagagtgggccatcatggtgcccgccgagagagccctgtacagagatgtgatgctggaaaactacgaggccgtggcttttgtggccgtgcctcctacaagcaagcccgctctggtgtcccacctggaacagggcaaggaaagctgcttcatccggcctccaggcgtgctgagcagaagcgactggcgggccggaggcggcccaagcagcggcgcccctcctcccagcggcggcagcccagccggctccccaacctctaccgaggagggcacctctgagtccgccacccccgagagcggccctggcacctccaccgagcccagcgagggcagcgcacccggcagccctgccggcagccccacctccacagaggagggaaccagcaccgagcccagcgaaggcagcgccccaggcaccagcaccgagcctagtgagcaggagattaaacggatcaacaagatcagaagaagacttgtgaaagacagcaacaccaagaaggccggcaagacaggccccatgaaaaccctgctggttagagtgatgacacccgatctgagagagcggctggaaaacctgagaaagaagcctgaaaatatcccccagcccatcagcaatacatctagagccaacctgaataagctgctgaccgattacaccgaaatgaagaaggcgatcctgcatgtgtactgggaagagttccagaaggaccctgtgggcctgatgagccgggtggcccagcctgccagcaagaagatcgatcagaacaagctgaaacctgagatggacgagaagggcaacctgaccaccgccggctttgcctgctctcagtgtggccagcccctgttcgtgtacaagctggagcaggtgtctgagaagggcaaggcttacaccaactacttcggacggtgcaatgtggccgagcacgaaaagctgatcctgctggcccagctgaagcccgagaaggatagcgacgaagccgtgacatatagcctgggaaagtttgggcagagggccctggatttctacagcattcatgtgaccaaggagtccacccaccccgtgaagcccctggcccagatcgccggaaacagatacgcctccggacctgtgggaaaggccctgagcgacgcatgtatgggcacaatcgcctccttcctgtctaagtaccaggacatcatcatcgaacaccagaaggtggtgaagggcaaccagaagagactggagagcctgcgggagctggccggcaaggaaaacctggaataccctagcgtgaccctgccacctcagcctcacaccaaggagggcgttgatgcctacaacgaagtgatcgcccgggtgcgaatgtgggtgaacctgaacctgtggcagaagctgaagctaagcagagatgatgccaagcctctgctgagactgaagggattcccttcctttcctctggtcgagagacaggccaacgaagtggactggtgggacatggtgtgtaacgtgaagaagctgatcaacgagaaaaaggaggatggcaaggtgttttggcagaatctggctggctacaagagacaggaagccctgagaccatacctgagcagcgaggaagatcggaagaagggaaagaaattcgctcggtaccagctgggcgacctgctgctgcacctggaaaagaagcacggcgaggactggggaaaggtgtacgacgaggcctgggagcggattgacaagaaagtggaaggcctgagcaagcacatcaagctggaagaggaacggagaagcgaggacgcccagagcaaggccgccctgaccgactggctgcgggctaaggccagcttcgtgatcgagggcctgaaggaggccgacaaggacgagttctgcagatgcgagctgaagctgcagaagtggtacggggacctgcggggaaagcccttcgccatcgaagccgagaacagcatcctggacatcagcggcttcagcaagcagtacaactgtgccttcatctggcagaaggacggcgtgaagaagctgaacctgtacctgatcatcaactacttcaagggcggcaagctgcggttcaagaagatcaaacctgaagccttcgaagccaacagattctacaccgtgatcaacaaaaagagcggcgagatcgtgcccatggaggtgaacttcaacttcgacgaccccaacctgatcatcctgcctctggcctttggcaagagacagggcagagaattcatctggaacgacctgctgtccctggaaaccggcagcctgaagctggccaacggaagagtgatcgagaagacactgtacaacagaagaacccggcaggatgagcctgccctgttcgtggccctgaccttcgagcggcgggaggtcctggactcctccaatatcaaaccaatgaacctgatcggcgtggcaagaggcgaaaacatccccgccgtgatcgccctgaccgaccccgagggctgcccactgagccggtttaaggatagcctgggaaacccaacccacatcctgagaatcggcgagagctataaggagaagcagcggaccatccaggccaagaaggaggtggagcagcggagagccggcggctacagccggaagtacgccagcaaagccaagaatctggcagacgatatggtgagaaacaccgctagagatctgctgtactacgccgtgacccaggatgccatgctgatcttcgccaacctgagccggggcttcggccggcagggcaagcggaccttcatggccgagagacagtacacacggatggaggactggctgaccgccaagctggcctacgagggcctgagcaagacctacctgtccaagacactggcccagtacacctccaagacatgcagcaactgtgggtttaccatcaccagcgccgactacgacagggtgctggagaagctgaagaagacagcaacaggctggatgaccacaattaacggcaaggagctgaaggtggagggccagattacctactacaacagatacaagagacagaacgtagtcaaggacctgtccgtcgagctggatagactgagcgaagaatctgtgaacaacgacatctcctcctggacaaagggcagaagcggagaagctctgagcctcctgaagaaaagattctcccatagacccgtgcaggagaagttcgtgtgcctgaactgcggcttcgagacacacgcagccgagcaagccgccctgaacatcgccagatcctggctgttcctgcggagccaggagtacaagaaataccagacaaacaagacaaccggcaacaccgataagagagccttcgtcgagacctggcagtccttttaccggaagaagcttaaggaggtgtggaaacctgccgtgcggtctggcggatctggcggaggctcctgtcgccttccgggacgtgatcgtggacttcacccaggaggaatggcagcagctgaagcctgctcaaaaggacctgtacagagatgtgatgatggaaatctactggaatctggtgtctctggacctggaaaccgagggagatatgaacgagcctgaccccgagaaagacagctgggaggatagaacaagcatcgtggttgtggaaggcctgatgcggaacggcgcccagggctacgcctgcgagaaggccggcatccagggctgtagagtgggatctggctccggcagcggccccaagaaaaagagaaaagtctaagctgccttctgcggggcttgccttctggccatgcccttcttctctcccttgcacctgtacctcttggtctttgaataaagcctgagtaggaaggctagcaaaaaaaaaaaaaaaaaaaaaaaaaaaaaaaaaaaaaaaaaaaaaaaaaaaaaaaaaaaaaaaaaaaaaaaaaaaaaaaa

SEQ ID NO: 18535 - RNA, 9494 nt, synthetic construct
  source 1..9494: mol_type = other RNA
aggaaataagagagaaaagaagagtaagaagaaatataagagccaccatggcccctaagaagaagcgtaaagtgagccggatggaacgcctcgtctacgaggtgcggcagaagtgcagaaacatcgaggacatctgcatctcctgcggatctctgaacgtgaccctggagcacccactgttcatcggcggcatgtgccagaactgtaaaaactgttttctggagtgtgcctatcaatacgacgatgacggctaccagagctactgcaccatctgttgcggcggaagagaggtgctgatgtgtggaaataacaactgctgccggtgcttctgcgtggaatgcgtggacctgctggtgggccccggcgccgcccaggccgctattaaggaagatccttggaactgctacatgtgcggccacaagggcacatacggcctgctgagacggagagaggactggcctagcagactgcagatgttcttcgccaataaccacgaccaggagttcgacccccctaaggtgtaccctcccgtccccgccgagaagagaaagcccatccgggtcctgagcctgttcgatggcatcgccaccggtctgctggtgctgaaggacctgggcatccaggtggataggtacattgcctccgaggtgtgcgaggactccatcaccgtgggaatggtgcgtcatcagggcaagatcatgtacgtgggcgacgtgcggagcgtgacacagaagcatatccaggagtggggccctttcgacctggtgatcggcggcagcccttgcaatgacctgagcatcgtgaacccagcccggaagggcctgtacgagggaaccggcagactgttcttcgagttttacagactgctgcacgacgcccggcctaaggaaggcgacgaccggcccttcttttggctgttcgagaatgtggtggccatgggagtcagcgacaagcgggatattagccggttcctggagagcaaccccgtgatgatcgatgccaaggaagtgagcgccgcccaccgggccagatacttctggggcaatctgcctggcatgaacagacccctggccagcaccgtgaacgacaagctggagctgcaggagtgcctggagcacggccggatcgccaagttcagcaaggtgagaaccatcaccacccgaagcaacagcatcaaacaaggcaaggaccagcactttcctgtgttcatgaacgagaaggaggacatcctgtggtgtaccgagatggagagagtgttcgggttcccagtccactacacagatgtcagcaacatgtctagactggccagacagagactgctgggaagaagctggtccgtccctgtgatcagacacctgttcgcccctctgaaggagtacttcgcctgcgtgagcagcggcaacagcaacgccaacagccggggccccagcttctctagcggcctggtgccactgtccctgagagggagccacatgggccccatggagatctacaaaaccgtgagcgcctggaagcggcagcctgtgcgcgtgctgagcctgtttcggaatatcgataaagtcctgaaaagcctgggattcctggagagcggctctggctccggcggtggcaccctgaagtacgtggaggatgtgacaaacgtggtcagacgggatgtggagaagtggggccccttcgatctggtgtacggcagcacccaacccctgggcagctcttgtgaccggtgccctggctggtacatgtttcagttccaccggatcctgcagtacgccctgccgagacaggagtcccagcggccattcttttggattttcatggacaacttgctgctgaccgaggatgaccaggaaactaccactcggttcctgcagaccgaagccgtgaccctgcaggacgtgagaggccgggactaccagaacgccatgcgggtgtggtccaacatccctggactgaaaagcaagcacgcacctctgacccctaaagaagaggagtacctgcaggcccaggtgcggagcagaagcaagctggacgcccctaaggtggatctgctggtgaagaattgcctcctgcccctgagagagtacttcaagtatttcagccagaatagtctgcccctgggaggcagcggcggcggcgccctggtgacatttgaggacgtcgccgtgcggttcacccaggaggaatgggctctgctggatccttctcagaaaatcctgtaccgggacgtgatgagagagacataccggaatctgacctccgtgggcatcaactgggaatgttgggaccttgaagcctgcttcagaagcctgggaagaaacctgagagtgcaggtggtgaagagaaagtgcgagctgaccaacagcggcccctgcgccgagggcggcccaagcagcggcgcccctcctcccagcggcggcagcccagccggctccccaacctctaccgaggagggcacctctgagtccgccacccccgagagcggccctggcacctccaccgagcccagcgagggcagcgcacccggcagccctgccggcagccccacctccacagaggagggaaccagcaccgagcccagcgaaggcagcgccccaggcaccagcaccgagcctagtgagcaggagattaaacggatcaacaagatcagaagaagacttgtgaaagacagcaacaccaagaaggccggcaagacaggccccatgaaaaccctgctggttagagtgatgacacccgatctgagagagcggctggaaaacctgagaaagaagcctgaaaatatcccccagcccatcagcaatacatctagagccaacctgaataagctgctgaccgattacaccgaaatgaagaaggcgatcctgcatgtgtactgggaagagttccagaaggaccctgtgggcctgatgagccgggtggcccagcctgccagcaagaagatcgatcagaacaagctgaaacctgagatggacgagaagggcaacctgaccaccgccggctttgcctgctctcagtgtggccagcccctgttcgtgtacaagctggagcaggtgtctgagaagggcaaggcttacaccaactacttcggacggtgcaatgtggccgagcacgaaaagctgatcctgctggcccagctgaagcccgagaaggatagcgacgaagccgtgacatatagcctgggaaagtttgggcagagggccctggatttctacagcattcatgtgaccaaggagtccacccaccccgtgaagcccctggcccagatcgccggaaacagatacgcctccggacctgtgggaaaggccctgagcgacgcatgtatgggcacaatcgcctccttcctgtctaagtaccaggacatcatcatcgaacaccagaaggtggtgaagggcaaccagaagagactggagagcctgcgggagctggccggcaaggaaaacctggaataccctagcgtgaccctgccacctcagcctcacaccaaggagggcgttgatgcctacaacgaagtgatcgcccgggtgcgaatgtgggtgaacctgaacctgtggcagaagctgaagctaagcagagatgatgccaagcctctgctgagactgaagggattcccttcctttcctctggtcgagagacaggccaacgaagtggactggtgggacatggtgtgtaacgtgaagaagctgatcaacgagaaaaaggaggatggcaaggtgttttggcagaatctggctggctacaagagacaggaagccctgagaccatacctgagcagcgaggaagatcggaagaagggaaagaaattcgctcggtaccagctgggcgacctgctgctgcacctggaaaagaagcacggcgaggactggggaaaggtgtacgacgaggcctgggagcggattgacaagaaagtggaaggcctgagcaagcacatcaagctggaagaggaacggagaagcgaggacgcccagagcaaggccgccctgaccgactggctgcgggctaaggccagcttcgtgatcgagggcctgaaggaggccgacaaggacgagttctgcagatgcgagctgaagctgcagaagtggtacggggacctgcggggaaagcccttcgccatcgaagccgagaacagcatcctggacatcagcggcttcagcaagcagtacaactgtgccttcatctggcagaaggacggcgtgaagaagctgaacctgtacctgatcatcaactacttcaagggcggcaagctgcggttcaagaagatcaaacctgaagccttcgaagccaacagattctacaccgtgatcaacaaaaagagcggcgagatcgtgcccatggaggtgaacttcaacttcgacgaccccaacctgatcatcctgcctctggcctttggcaagagacagggcagagaattcatctggaacgacctgctgtccctggaaaccggcagcctgaagctggccaacggaagagtgatcgagaagacactgtacaacagaagaacccggcaggatgagcctgccctgttcgtggccctgaccttcgagcggcgggaggtcctggactcctccaatatcaaaccaatgaacctgatcggcgtggcaagaggcgaaaacatccccgccgtgatcgccctgaccgaccccgagggctgcccactgagccggtttaaggatagcctgggaaacccaacccacatcctgagaatcggcgagagctataaggagaagcagcggaccatccaggccaagaaggaggtggagcagcggagagccggcggctacagccggaagtacgccagcaaagccaagaatctggcagacgatatggtgagaaacaccgctagagatctgctgtactacgccgtgacccaggatgccatgctgatcttcgccaacctgagccggggcttcggccggcagggcaagcggaccttcatggccgagagacagtacacacggatggaggactggctgaccgccaagctggcctacgagggcctgagcaagacctacctgtccaagacactggcccagtacacctccaagacatgcagcaactgtgggtttaccatcaccagcgccgactacgacagggtgctggagaagctgaagaagacagcaacaggctggatgaccacaattaacggcaaggagctgaaggtggagggccagattacctactacaacagatacaagagacagaacgtagtcaaggacctgtccgtcgagctggatagactgagcgaagaatctgtgaacaacgacatctcctcctggacaaagggcagaagcggagaagctctgagcctcctgaagaaaagattctcccatagacccgtgcaggagaagttcgtgtgcctgaactgcggcttcgagacacacgcagccgagcaagccgccctgaacatcgccagatcctggctgttcctgcggagccaggagtacaagaaataccagacaaacaagacaaccggcaacaccgataagagagccttcgtcgagacctggcagtccttttaccggaagaagcttaaggaggtgtggaaacctgccgtgcggtctggcggatctggcggaggctcctctcaggagagcgtggccttcgaggacgtggccgtctacttcaccaccaaagagtgggccatcatggtgcccgccgagagagccctgtacagagatgtgatgctggaaaactacgaggccgtggcttttgtggccgtgcctcctacaagcaagcccgctctggtgtcccacctggaacagggcaaggaaagctgcttcatccggcctccaggcgtgctgagcagaagcgactggcgggccggaggcggcccaagcagcggcgcccctcctcccagcggcggcagcccagccggctccccaacctctaccgaggagggcacctctgagtccgccacccccgagagcggccctggcacctccaccgagcccagcgagggcagcgcacccggcagccctgccggcagccccacctccacagaggagggaaccagcaccgagcccagcgaaggcagcgccccaggcaccagcaccgagcctagtgagcaggagattaaacggatcaacaagatcagaagaagacttgtgaaagacagcaacaccaagaaggccggcaagacaggccccatgaaaaccctgctggttagagtgatgacacccgatctgagagagcggctggaaaacctgagaaagaagcctgaaaatatcccccagcccatcagcaatacatctagagccaacctgaataagctgctgaccgattacaccgaaatgaagaaggcgatcctgcatgtgtactgggaagagttccagaaggaccctgtgggcctgatgagccgggtggcccagcctgccagcaagaagatcgatcagaacaagctgaaacctgagatggacgagaagggcaacctgaccaccgccggctttgcctgctctcagtgtggccagcccctgttcgtgtacaagctggagcaggtgtctgagaagggcaaggcttacaccaactacttcggacggtgcaatgtggccgagcacgaaaagctgatcctgctggcccagctgaagcccgagaaggatagcgacgaagccgtgacatatagcctgggaaagtttgggcagagggccctggatttctacagcattcatgtgaccaaggagtccacccaccccgtgaagcccctggcccagatcgccggaaacagatacgcctccggacctgtgggaaaggccctgagcgacgcatgtatgggcacaatcgcctccttcctgtctaagtaccaggacatcatcatcgaacaccagaaggtggtgaagggcaaccagaagagactggagagcctgcgggagctggccggcaaggaaaacctggaataccctagcgtgaccctgccacctcagcctcacaccaaggagggcgttgatgcctacaacgaagtgatcgcccgggtgcgaatgtgggtgaacctgaacctgtggcagaagctgaagctaagcagagatgatgccaagcctctgctgagactgaagggattcccttcctttcctctggtcgagagacaggccaacgaagtggactggtgggacatggtgtgtaacgtgaagaagctgatcaacgagaaaaaggaggatggcaaggtgttttggcagaatctggctggctacaagagacaggaagccctgagaccatacctgagcagcgaggaagatcggaagaagggaaagaaattcgctcggtaccagctgggcgacctgctgctgcacctggaaaagaagcacggcgaggactggggaaaggtgtacgacgaggcctgggagcggattgacaagaaagtggaaggcctgagcaagcacatcaagctggaagaggaacggagaagcgaggacgcccagagcaaggccgccctgaccgactggctgcgggctaaggccagcttcgtgatcgagggcctgaaggaggccgacaaggacgagttctgcagatgcgagctgaagctgcagaagtggtacggggacctgcggggaaagcccttcgccatcgaagccgagaacagcatcctggacatcagcggcttcagcaagcagtacaactgtgccttcatctggcagaaggacggcgtgaagaagctgaacctgtacctgatcatcaactacttcaagggcggcaagctgcggttcaagaagatcaaacctgaagccttcgaagccaacagattctacaccgtgatcaacaaaaagagcggcgagatcgtgcccatggaggtgaacttcaacttcgacgaccccaacctgatcatcctgcctctggcctttggcaagagacagggcagagaattcatctggaacgacctgctgtccctggaaaccggcagcctgaagctggccaacggaagagtgatcgagaagacactgtacaacagaagaacccggcaggatgagcctgccctgttcgtggccctgaccttcgagcggcgggaggtcctggactcctccaatatcaaaccaatgaacctgatcggcgtggcaagaggcgaaaacatccccgccgtgatcgccctgaccgaccccgagggctgcccactgagccggtttaaggatagcctgggaaacccaacccacatcctgagaatcggcgagagctataaggagaagcagcggaccatccaggccaagaaggaggtggagcagcggagagccggcggctacagccggaagtacgccagcaaagccaagaatctggcagacgatatggtgagaaacaccgctagagatctgctgtactacgccgtgacccaggatgccatgctgatcttcgccaacctgagccggggcttcggccggcagggcaagcggaccttcatggccgagagacagtacacacggatggaggactggctgaccgccaagctggcctacgagggcctgagcaagacctacctgtccaagacactggcccagtacacctccaagacatgcagcaactgtgggtttaccatcaccagcgccgactacgacagggtgctggagaagctgaagaagacagcaacaggctggatgaccacaattaacggcaaggagctgaaggtggagggccagattacctactacaacagatacaagagacagaacgtagtcaaggacctgtccgtcgagctggatagactgagcgaagaatctgtgaacaacgacatctcctcctggacaaagggcagaagcggagaagctctgagcctcctgaagaaaagattctcccatagacccgtgcaggagaagttcgtgtgcctgaactgcggcttcgagacacacgcagccgagcaagccgccctgaacatcgccagatcctggctgttcctgcggagccaggagtacaagaaataccagacaaacaagacaaccggcaacaccgataagagagccttcgtcgagacctggcagtccttttaccggaagaagcttaaggaggtgtggaaacctgccgtgcggtctggcggatctggcggaggctcctgtgacctacaacgacgtgcacgtggacatcacccaggaggaatgggctctgatggaccccagccagcggaacctgtacaaggatgtgatggtcgagacatacatgaacctgaccgccatcggatataattgggagaacctggaagtggaagaaccatgtcagaaccccctgaagcacggcagacacgagagacctcatacaggcgagaaaccttacgagtacaatcagtgcggcaaggccttcgcccaacctggatctggctccggcagcggccccaagaaaaagagaaaagtctaagctgccttctgcggggcttgccttctggccatgcccttcttctctcccttgcacctgtacctcttggtctttgaataaagcctgagtaggaaggctagcaaaaaaaaaaaaaaaaaaaaaaaaaaaaaaaaaaaaaaaaaaaaaaaaaaaaaaaaaaaaaaaaaaaaaaaaaaaaaaaa

SEQ ID NO: 18536 - RNA, 9485 nt, synthetic construct
  source 1..9485: mol_type = other RNA
aggaaataagagagaaaagaagagtaagaagaaatataagagccaccatggcccctaagaagaagcgtaaagtgagccggatggaacgcctcgtctacgaggtgcggcagaagtgcagaaacatcgaggacatctgcatctcctgcggatctctgaacgtgaccctggagcacccactgttcatcggcggcatgtgccagaactgtaaaaactgttttctggagtgtgcctatcaatacgacgatgacggctaccagagctactgcaccatctgttgcggcggaagagaggtgctgatgtgtggaaataacaactgctgccggtgcttctgcgtggaatgcgtggacctgctggtgggccccggcgccgcccaggccgctattaaggaagatccttggaactgctacatgtgcggccacaagggcacatacggcctgctgagacggagagaggactggcctagcagactgcagatgttcttcgccaataaccacgaccaggagttcgacccccctaaggtgtaccctcccgtccccgccgagaagagaaagcccatccgggtcctgagcctgttcgatggcatcgccaccggtctgctggtgctgaaggacctgggcatccaggtggataggtacattgcctccgaggtgtgcgaggactccatcaccgtgggaatggtgcgtcatcagggcaagatcatgtacgtgggcgacgtgcggagcgtgacacagaagcatatccaggagtggggccctttcgacctggtgatcggcggcagcccttgcaatgacctgagcatcgtgaacccagcccggaagggcctgtacgagggaaccggcagactgttcttcgagttttacagactgctgcacgacgcccggcctaaggaaggcgacgaccggcccttcttttggctgttcgagaatgtggtggccatgggagtcagcgacaagcgggatattagccggttcctggagagcaaccccgtgatgatcgatgccaaggaagtgagcgccgcccaccgggccagatacttctggggcaatctgcctggcatgaacagacccctggccagcaccgtgaacgacaagctggagctgcaggagtgcctggagcacggccggatcgccaagttcagcaaggtgagaaccatcaccacccgaagcaacagcatcaaacaaggcaaggaccagcactttcctgtgttcatgaacgagaaggaggacatcctgtggtgtaccgagatggagagagtgttcgggttcccagtccactacacagatgtcagcaacatgtctagactggccagacagagactgctgggaagaagctggtccgtccctgtgatcagacacctgttcgcccctctgaaggagtacttcgcctgcgtgagcagcggcaacagcaacgccaacagccggggccccagcttctctagcggcctggtgccactgtccctgagagggagccacatgggccccatggagatctacaaaaccgtgagcgcctggaagcggcagcctgtgcgcgtgctgagcctgtttcggaatatcgataaagtcctgaaaagcctgggattcctggagagcggctctggctccggcggtggcaccctgaagtacgtggaggatgtgacaaacgtggtcagacgggatgtggagaagtggggccccttcgatctggtgtacggcagcacccaacccctgggcagctcttgtgaccggtgccctggctggtacatgtttcagttccaccggatcctgcagtacgccctgccgagacaggagtcccagcggccattcttttggattttcatggacaacttgctgctgaccgaggatgaccaggaaactaccactcggttcctgcagaccgaagccgtgaccctgcaggacgtgagaggccgggactaccagaacgccatgcgggtgtggtccaacatccctggactgaaaagcaagcacgcacctctgacccctaaagaagaggagtacctgcaggcccaggtgcggagcagaagcaagctggacgcccctaaggtggatctgctggtgaagaattgcctcctgcccctgagagagtacttcaagtatttcagccagaatagtctgcccctgggaggcagcggcggcggcgccctggtgacatttgaggacgtcgccgtgcggttcacccaggaggaatgggctctgctggatccttctcagaaaatcctgtaccgggacgtgatgagagagacataccggaatctgacctccgtgggcatcaactgggaatgttgggaccttgaagcctgcttcagaagcctgggaagaaacctgagagtgcaggtggtgaagagaaagtgcgagctgaccaacagcggcccctgcgccgagggcggcccaagcagcggcgcccctcctcccagcggcggcagcccagccggctccccaacctctaccgaggagggcacctctgagtccgccacccccgagagcggccctggcacctccaccgagcccagcgagggcagcgcacccggcagccctgccggcagccccacctccacagaggagggaaccagcaccgagcccagcgaaggcagcgccccaggcaccagcaccgagcctagtgagcaggagattaaacggatcaacaagatcagaagaagacttgtgaaagacagcaacaccaagaaggccggcaagacaggccccatgaaaaccctgctggttagagtgatgacacccgatctgagagagcggctggaaaacctgagaaagaagcctgaaaatatcccccagcccatcagcaatacatctagagccaacctgaataagctgctgaccgattacaccgaaatgaagaaggcgatcctgcatgtgtactgggaagagttccagaaggaccctgtgggcctgatgagccgggtggcccagcctgccagcaagaagatcgatcagaacaagctgaaacctgagatggacgagaagggcaacctgaccaccgccggctttgcctgctctcagtgtggccagcccctgttcgtgtacaagctggagcaggtgtctgagaagggcaaggcttacaccaactacttcggacggtgcaatgtggccgagcacgaaaagctgatcctgctggcccagctgaagcccgagaaggatagcgacgaagccgtgacatatagcctgggaaagtttgggcagagggccctggatttctacagcattcatgtgaccaaggagtccacccaccccgtgaagcccctggcccagatcgccggaaacagatacgcctccggacctgtgggaaaggccctgagcgacgcatgtatgggcacaatcgcctccttcctgtctaagtaccaggacatcatcatcgaacaccagaaggtggtgaagggcaaccagaagagactggagagcctgcgggagctggccggcaaggaaaacctggaataccctagcgtgaccctgccacctcagcctcacaccaaggagggcgttgatgcctacaacgaagtgatcgcccgggtgcgaatgtgggtgaacctgaacctgtggcagaagctgaagctaagcagagatgatgccaagcctctgctgagactgaagggattcccttcctttcctctggtcgagagacaggccaacgaagtggactggtgggacatggtgtgtaacgtgaagaagctgatcaacgagaaaaaggaggatggcaaggtgttttggcagaatctggctggctacaagagacaggaagccctgagaccatacctgagcagcgaggaagatcggaagaagggaaagaaattcgctcggtaccagctgggcgacctgctgctgcacctggaaaagaagcacggcgaggactggggaaaggtgtacgacgaggcctgggagcggattgacaagaaagtggaaggcctgagcaagcacatcaagctggaagaggaacggagaagcgaggacgcccagagcaaggccgccctgaccgactggctgcgggctaaggccagcttcgtgatcgagggcctgaaggaggccgacaaggacgagttctgcagatgcgagctgaagctgcagaagtggtacggggacctgcggggaaagcccttcgccatcgaagccgagaacagcatcctggacatcagcggcttcagcaagcagtacaactgtgccttcatctggcagaaggacggcgtgaagaagctgaacctgtacctgatcatcaactacttcaagggcggcaagctgcggttcaagaagatcaaacctgaagccttcgaagccaacagattctacaccgtgatcaacaaaaagagcggcgagatcgtgcccatggaggtgaacttcaacttcgacgaccccaacctgatcatcctgcctctggcctttggcaagagacagggcagagaattcatctggaacgacctgctgtccctggaaaccggcagcctgaagctggccaacggaagagtgatcgagaagacactgtacaacagaagaacccggcaggatgagcctgccctgttcgtggccctgaccttcgagcggcgggaggtcctggactcctccaatatcaaaccaatgaacctgatcggcgtggcaagaggcgaaaacatccccgccgtgatcgccctgaccgaccccgagggctgcccactgagccggtttaaggatagcctgggaaacccaacccacatcctgagaatcggcgagagctataaggagaagcagcggaccatccaggccaagaaggaggtggagcagcggagagccggcggctacagccggaagtacgccagcaaagccaagaatctggcagacgatatggtgagaaacaccgctagagatctgctgtactacgccgtgacccaggatgccatgctgatcttcgccaacctgagccggggcttcggccggcagggcaagcggaccttcatggccgagagacagtacacacggatggaggactggctgaccgccaagctggcctacgagggcctgagcaagacctacctgtccaagacactggcccagtacacctccaagacatgcagcaactgtgggtttaccatcaccagcgccgactacgacagggtgctggagaagctgaagaagacagcaacaggctggatgaccacaattaacggcaaggagctgaaggtggagggccagattacctactacaacagatacaagagacagaacgtagtcaaggacctgtccgtcgagctggatagactgagcgaagaatctgtgaacaacgacatctcctcctggacaaagggcagaagcggagaagctctgagcctcctgaagaaaagattctcccatagacccgtgcaggagaagttcgtgtgcctgaactgcggcttcgagacacacgcagccgagcaagccgccctgaacatcgccagatcctggctgttcctgcggagccaggagtacaagaaataccagacaaacaagacaaccggcaacaccgataagagagccttcgtcgagacctggcagtccttttaccggaagaagcttaaggaggtgtggaaacctgccgtgcggtctggcggatctggcggaggctcctctcaggagagcgtggccttcgaggacgtggccgtctacttcaccaccaaagagtgggccatcatggtgcccgccgagagagccctgtacagagatgtgatgctggaaaactacgaggccgtggcttttgtggccgtgcctcctacaagcaagcccgctctggtgtcccacctggaacagggcaaggaaagctgcttcatccggcctccaggcgtgctgagcagaagcgactggcgggccggaggcggcccaagcagcggcgcccctcctcccagcggcggcagcccagccggctccccaacctctaccgaggagggcacctctgagtccgccacccccgagagcggccctggcacctccaccgagcccagcgagggcagcgcacccggcagccctgccggcagccccacctccacagaggagggaaccagcaccgagcccagcgaaggcagcgccccaggcaccagcaccgagcctagtgagcaggagattaaacggatcaacaagatcagaagaagacttgtgaaagacagcaacaccaagaaggccggcaagacaggccccatgaaaaccctgctggttagagtgatgacacccgatctgagagagcggctggaaaacctgagaaagaagcctgaaaatatcccccagcccatcagcaatacatctagagccaacctgaataagctgctgaccgattacaccgaaatgaagaaggcgatcctgcatgtgtactgggaagagttccagaaggaccctgtgggcctgatgagccgggtggcccagcctgccagcaagaagatcgatcagaacaagctgaaacctgagatggacgagaagggcaacctgaccaccgccggctttgcctgctctcagtgtggccagcccctgttcgtgtacaagctggagcaggtgtctgagaagggcaaggcttacaccaactacttcggacggtgcaatgtggccgagcacgaaaagctgatcctgctggcccagctgaagcccgagaaggatagcgacgaagccgtgacatatagcctgggaaagtttgggcagagggccctggatttctacagcattcatgtgaccaaggagtccacccaccccgtgaagcccctggcccagatcgccggaaacagatacgcctccggacctgtgggaaaggccctgagcgacgcatgtatgggcacaatcgcctccttcctgtctaagtaccaggacatcatcatcgaacaccagaaggtggtgaagggcaaccagaagagactggagagcctgcgggagctggccggcaaggaaaacctggaataccctagcgtgaccctgccacctcagcctcacaccaaggagggcgttgatgcctacaacgaagtgatcgcccgggtgcgaatgtgggtgaacctgaacctgtggcagaagctgaagctaagcagagatgatgccaagcctctgctgagactgaagggattcccttcctttcctctggtcgagagacaggccaacgaagtggactggtgggacatggtgtgtaacgtgaagaagctgatcaacgagaaaaaggaggatggcaaggtgttttggcagaatctggctggctacaagagacaggaagccctgagaccatacctgagcagcgaggaagatcggaagaagggaaagaaattcgctcggtaccagctgggcgacctgctgctgcacctggaaaagaagcacggcgaggactggggaaaggtgtacgacgaggcctgggagcggattgacaagaaagtggaaggcctgagcaagcacatcaagctggaagaggaacggagaagcgaggacgcccagagcaaggccgccctgaccgactggctgcgggctaaggccagcttcgtgatcgagggcctgaaggaggccgacaaggacgagttctgcagatgcgagctgaagctgcagaagtggtacggggacctgcggggaaagcccttcgccatcgaagccgagaacagcatcctggacatcagcggcttcagcaagcagtacaactgtgccttcatctggcagaaggacggcgtgaagaagctgaacctgtacctgatcatcaactacttcaagggcggcaagctgcggttcaagaagatcaaacctgaagccttcgaagccaacagattctacaccgtgatcaacaaaaagagcggcgagatcgtgcccatggaggtgaacttcaacttcgacgaccccaacctgatcatcctgcctctggcctttggcaagagacagggcagagaattcatctggaacgacctgctgtccctggaaaccggcagcctgaagctggccaacggaagagtgatcgagaagacactgtacaacagaagaacccggcaggatgagcctgccctgttcgtggccctgaccttcgagcggcgggaggtcctggactcctccaatatcaaaccaatgaacctgatcggcgtggcaagaggcgaaaacatccccgccgtgatcgccctgaccgaccccgagggctgcccactgagccggtttaaggatagcctgggaaacccaacccacatcctgagaatcggcgagagctataaggagaagcagcggaccatccaggccaagaaggaggtggagcagcggagagccggcggctacagccggaagtacgccagcaaagccaagaatctggcagacgatatggtgagaaacaccgctagagatctgctgtactacgccgtgacccaggatgccatgctgatcttcgccaacctgagccggggcttcggccggcagggcaagcggaccttcatggccgagagacagtacacacggatggaggactggctgaccgccaagctggcctacgagggcctgagcaagacctacctgtccaagacactggcccagtacacctccaagacatgcagcaactgtgggtttaccatcaccagcgccgactacgacagggtgctggagaagctgaagaagacagcaacaggctggatgaccacaattaacggcaaggagctgaaggtggagggccagattacctactacaacagatacaagagacagaacgtagtcaaggacctgtccgtcgagctggatagactgagcgaagaatctgtgaacaacgacatctcctcctggacaaagggcagaagcggagaagctctgagcctcctgaagaaaagattctcccatagacccgtgcaggagaagttcgtgtgcctgaactgcggcttcgagacacacgcagccgagcaagccgccctgaacatcgccagatcctggctgttcctgcggagccaggagtacaagaaataccagacaaacaagacaaccggcaacaccgataagagagccttcgtcgagacctggcagtccttttaccggaagaagcttaaggaggtgtggaaacctgccgtgcggtctggcggatctggcggaggctccttctaaagcccctatcacattcggcgacctggccatctacttcagccaggaggaatgggagtggctgagccccatccagaaggacctgtacgaggacgtgatgctggaaaactacagaaatctggtgtccctgggcctcagctttagacgccccaacgtgatcaccctgctggaaaagggcaaggccccatggatggtcgagcctgctagacggcggagaggacctgatagcggcagcaaggtgggatctggctccggcagcggccccaagaaaaagagaaaagtctaagctgccttctgcggggcttgccttctggccatgcccttcttctctcccttgcacctgtacctcttggtctttgaataaagcctgagtaggaaggctagcaaaaaaaaaaaaaaaaaaaaaaaaaaaaaaaaaaaaaaaaaaaaaaaaaaaaaaaaaaaaaaaaaaaaaaaaaaaaaaaa

SEQ ID NO: 18537 - RNA, 9485 nt, synthetic construct
  source 1..9485: mol_type = other RNA
aggaaataagagagaaaagaagagtaagaagaaatataagagccaccatggcccctaagaagaagcgtaaagtgagccggatggaacgcctcgtctacgaggtgcggcagaagtgcagaaacatcgaggacatctgcatctcctgcggatctctgaacgtgaccctggagcacccactgttcatcggcggcatgtgccagaactgtaaaaactgttttctggagtgtgcctatcaatacgacgatgacggctaccagagctactgcaccatctgttgcggcggaagagaggtgctgatgtgtggaaataacaactgctgccggtgcttctgcgtggaatgcgtggacctgctggtgggccccggcgccgcccaggccgctattaaggaagatccttggaactgctacatgtgcggccacaagggcacatacggcctgctgagacggagagaggactggcctagcagactgcagatgttcttcgccaataaccacgaccaggagttcgacccccctaaggtgtaccctcccgtccccgccgagaagagaaagcccatccgggtcctgagcctgttcgatggcatcgccaccggtctgctggtgctgaaggacctgggcatccaggtggataggtacattgcctccgaggtgtgcgaggactccatcaccgtgggaatggtgcgtcatcagggcaagatcatgtacgtgggcgacgtgcggagcgtgacacagaagcatatccaggagtggggccctttcgacctggtgatcggcggcagcccttgcaatgacctgagcatcgtgaacccagcccggaagggcctgtacgagggaaccggcagactgttcttcgagttttacagactgctgcacgacgcccggcctaaggaaggcgacgaccggcccttcttttggctgttcgagaatgtggtggccatgggagtcagcgacaagcgggatattagccggttcctggagagcaaccccgtgatgatcgatgccaaggaagtgagcgccgcccaccgggccagatacttctggggcaatctgcctggcatgaacagacccctggccagcaccgtgaacgacaagctggagctgcaggagtgcctggagcacggccggatcgccaagttcagcaaggtgagaaccatcaccacccgaagcaacagcatcaaacaaggcaaggaccagcactttcctgtgttcatgaacgagaaggaggacatcctgtggtgtaccgagatggagagagtgttcgggttcccagtccactacacagatgtcagcaacatgtctagactggccagacagagactgctgggaagaagctggtccgtccctgtgatcagacacctgttcgcccctctgaaggagtacttcgcctgcgtgagcagcggcaacagcaacgccaacagccggggccccagcttctctagcggcctggtgccactgtccctgagagggagccacatgggccccatggagatctacaaaaccgtgagcgcctggaagcggcagcctgtgcgcgtgctgagcctgtttcggaatatcgataaagtcctgaaaagcctgggattcctggagagcggctctggctccggcggtggcaccctgaagtacgtggaggatgtgacaaacgtggtcagacgggatgtggagaagtggggccccttcgatctggtgtacggcagcacccaacccctgggcagctcttgtgaccggtgccctggctggtacatgtttcagttccaccggatcctgcagtacgccctgccgagacaggagtcccagcggccattcttttggattttcatggacaacttgctgctgaccgaggatgaccaggaaactaccactcggttcctgcagaccgaagccgtgaccctgcaggacgtgagaggccgggactaccagaacgccatgcgggtgtggtccaacatccctggactgaaaagcaagcacgcacctctgacccctaaagaagaggagtacctgcaggcccaggtgcggagcagaagcaagctggacgcccctaaggtggatctgctggtgaagaattgcctcctgcccctgagagagtacttcaagtatttcagccagaatagtctgcccctgggaggcagcggcggcggcgccctggtgacatttgaggacgtcgccgtgcggttcacccaggaggaatgggctctgctggatccttctcagaaaatcctgtaccgggacgtgatgagagagacataccggaatctgacctccgtgggcatcaactgggaatgttgggaccttgaagcctgcttcagaagcctgggaagaaacctgagagtgcaggtggtgaagagaaagtgcgagctgaccaacagcggcccctgcgccgagggcggcccaagcagcggcgcccctcctcccagcggcggcagcccagccggctccccaacctctaccgaggagggcacctctgagtccgccacccccgagagcggccctggcacctccaccgagcccagcgagggcagcgcacccggcagccctgccggcagccccacctccacagaggagggaaccagcaccgagcccagcgaaggcagcgccccaggcaccagcaccgagcctagtgagcaggagattaaacggatcaacaagatcagaagaagacttgtgaaagacagcaacaccaagaaggccggcaagacaggccccatgaaaaccctgctggttagagtgatgacacccgatctgagagagcggctggaaaacctgagaaagaagcctgaaaatatcccccagcccatcagcaatacatctagagccaacctgaataagctgctgaccgattacaccgaaatgaagaaggcgatcctgcatgtgtactgggaagagttccagaaggaccctgtgggcctgatgagccgggtggcccagcctgccagcaagaagatcgatcagaacaagctgaaacctgagatggacgagaagggcaacctgaccaccgccggctttgcctgctctcagtgtggccagcccctgttcgtgtacaagctggagcaggtgtctgagaagggcaaggcttacaccaactacttcggacggtgcaatgtggccgagcacgaaaagctgatcctgctggcccagctgaagcccgagaaggatagcgacgaagccgtgacatatagcctgggaaagtttgggcagagggccctggatttctacagcattcatgtgaccaaggagtccacccaccccgtgaagcccctggcccagatcgccggaaacagatacgcctccggacctgtgggaaaggccctgagcgacgcatgtatgggcacaatcgcctccttcctgtctaagtaccaggacatcatcatcgaacaccagaaggtggtgaagggcaaccagaagagactggagagcctgcgggagctggccggcaaggaaaacctggaataccctagcgtgaccctgccacctcagcctcacaccaaggagggcgttgatgcctacaacgaagtgatcgcccgggtgcgaatgtgggtgaacctgaacctgtggcagaagctgaagctaagcagagatgatgccaagcctctgctgagactgaagggattcccttcctttcctctggtcgagagacaggccaacgaagtggactggtgggacatggtgtgtaacgtgaagaagctgatcaacgagaaaaaggaggatggcaaggtgttttggcagaatctggctggctacaagagacaggaagccctgagaccatacctgagcagcgaggaagatcggaagaagggaaagaaattcgctcggtaccagctgggcgacctgctgctgcacctggaaaagaagcacggcgaggactggggaaaggtgtacgacgaggcctgggagcggattgacaagaaagtggaaggcctgagcaagcacatcaagctggaagaggaacggagaagcgaggacgcccagagcaaggccgccctgaccgactggctgcgggctaaggccagcttcgtgatcgagggcctgaaggaggccgacaaggacgagttctgcagatgcgagctgaagctgcagaagtggtacggggacctgcggggaaagcccttcgccatcgaagccgagaacagcatcctggacatcagcggcttcagcaagcagtacaactgtgccttcatctggcagaaggacggcgtgaagaagctgaacctgtacctgatcatcaactacttcaagggcggcaagctgcggttcaagaagatcaaacctgaagccttcgaagccaacagattctacaccgtgatcaacaaaaagagcggcgagatcgtgcccatggaggtgaacttcaacttcgacgaccccaacctgatcatcctgcctctggcctttggcaagagacagggcagagaattcatctggaacgacctgctgtccctggaaaccggcagcctgaagctggccaacggaagagtgatcgagaagacactgtacaacagaagaacccggcaggatgagcctgccctgttcgtggccctgaccttcgagcggcgggaggtcctggactcctccaatatcaaaccaatgaacctgatcggcgtggcaagaggcgaaaacatccccgccgtgatcgccctgaccgaccccgagggctgcccactgagccggtttaaggatagcctgggaaacccaacccacatcctgagaatcggcgagagctataaggagaagcagcggaccatccaggccaagaaggaggtggagcagcggagagccggcggctacagccggaagtacgccagcaaagccaagaatctggcagacgatatggtgagaaacaccgctagagatctgctgtactacgccgtgacccaggatgccatgctgatcttcgccaacctgagccggggcttcggccggcagggcaagcggaccttcatggccgagagacagtacacacggatggaggactggctgaccgccaagctggcctacgagggcctgagcaagacctacctgtccaagacactggcccagtacacctccaagacatgcagcaactgtgggtttaccatcaccagcgccgactacgacagggtgctggagaagctgaagaagacagcaacaggctggatgaccacaattaacggcaaggagctgaaggtggagggccagattacctactacaacagatacaagagacagaacgtagtcaaggacctgtccgtcgagctggatagactgagcgaagaatctgtgaacaacgacatctcctcctggacaaagggcagaagcggagaagctctgagcctcctgaagaaaagattctcccatagacccgtgcaggagaagttcgtgtgcctgaactgcggcttcgagacacacgcagccgagcaagccgccctgaacatcgccagatcctggctgttcctgcggagccaggagtacaagaaataccagacaaacaagacaaccggcaacaccgataagagagccttcgtcgagacctggcagtccttttaccggaagaagcttaaggaggtgtggaaacctgccgtgcggtctggcggatctggcggaggctcctctcaggagagcgtggccttcgaggacgtggccgtctacttcaccaccaaagagtgggccatcatggtgcccgccgagagagccctgtacagagatgtgatgctggaaaactacgaggccgtggcttttgtggccgtgcctcctacaagcaagcccgctctggtgtcccacctggaacagggcaaggaaagctgcttcatccggcctccaggcgtgctgagcagaagcgactggcgggccggaggcggcccaagcagcggcgcccctcctcccagcggcggcagcccagccggctccccaacctctaccgaggagggcacctctgagtccgccacccccgagagcggccctggcacctccaccgagcccagcgagggcagcgcacccggcagccctgccggcagccccacctccacagaggagggaaccagcaccgagcccagcgaaggcagcgccccaggcaccagcaccgagcctagtgagcaggagattaaacggatcaacaagatcagaagaagacttgtgaaagacagcaacaccaagaaggccggcaagacaggccccatgaaaaccctgctggttagagtgatgacacccgatctgagagagcggctggaaaacctgagaaagaagcctgaaaatatcccccagcccatcagcaatacatctagagccaacctgaataagctgctgaccgattacaccgaaatgaagaaggcgatcctgcatgtgtactgggaagagttccagaaggaccctgtgggcctgatgagccgggtggcccagcctgccagcaagaagatcgatcagaacaagctgaaacctgagatggacgagaagggcaacctgaccaccgccggctttgcctgctctcagtgtggccagcccctgttcgtgtacaagctggagcaggtgtctgagaagggcaaggcttacaccaactacttcggacggtgcaatgtggccgagcacgaaaagctgatcctgctggcccagctgaagcccgagaaggatagcgacgaagccgtgacatatagcctgggaaagtttgggcagagggccctggatttctacagcattcatgtgaccaaggagtccacccaccccgtgaagcccctggcccagatcgccggaaacagatacgcctccggacctgtgggaaaggccctgagcgacgcatgtatgggcacaatcgcctccttcctgtctaagtaccaggacatcatcatcgaacaccagaaggtggtgaagggcaaccagaagagactggagagcctgcgggagctggccggcaaggaaaacctggaataccctagcgtgaccctgccacctcagcctcacaccaaggagggcgttgatgcctacaacgaagtgatcgcccgggtgcgaatgtgggtgaacctgaacctgtggcagaagctgaagctaagcagagatgatgccaagcctctgctgagactgaagggattcccttcctttcctctggtcgagagacaggccaacgaagtggactggtgggacatggtgtgtaacgtgaagaagctgatcaacgagaaaaaggaggatggcaaggtgttttggcagaatctggctggctacaagagacaggaagccctgagaccatacctgagcagcgaggaagatcggaagaagggaaagaaattcgctcggtaccagctgggcgacctgctgctgcacctggaaaagaagcacggcgaggactggggaaaggtgtacgacgaggcctgggagcggattgacaagaaagtggaaggcctgagcaagcacatcaagctggaagaggaacggagaagcgaggacgcccagagcaaggccgccctgaccgactggctgcgggctaaggccagcttcgtgatcgagggcctgaaggaggccgacaaggacgagttctgcagatgcgagctgaagctgcagaagtggtacggggacctgcggggaaagcccttcgccatcgaagccgagaacagcatcctggacatcagcggcttcagcaagcagtacaactgtgccttcatctggcagaaggacggcgtgaagaagctgaacctgtacctgatcatcaactacttcaagggcggcaagctgcggttcaagaagatcaaacctgaagccttcgaagccaacagattctacaccgtgatcaacaaaaagagcggcgagatcgtgcccatggaggtgaacttcaacttcgacgaccccaacctgatcatcctgcctctggcctttggcaagagacagggcagagaattcatctggaacgacctgctgtccctggaaaccggcagcctgaagctggccaacggaagagtgatcgagaagacactgtacaacagaagaacccggcaggatgagcctgccctgttcgtggccctgaccttcgagcggcgggaggtcctggactcctccaatatcaaaccaatgaacctgatcggcgtggcaagaggcgaaaacatccccgccgtgatcgccctgaccgaccccgagggctgcccactgagccggtttaaggatagcctgggaaacccaacccacatcctgagaatcggcgagagctataaggagaagcagcggaccatccaggccaagaaggaggtggagcagcggagagccggcggctacagccggaagtacgccagcaaagccaagaatctggcagacgatatggtgagaaacaccgctagagatctgctgtactacgccgtgacccaggatgccatgctgatcttcgccaacctgagccggggcttcggccggcagggcaagcggaccttcatggccgagagacagtacacacggatggaggactggctgaccgccaagctggcctacgagggcctgagcaagacctacctgtccaagacactggcccagtacacctccaagacatgcagcaactgtgggtttaccatcaccagcgccgactacgacagggtgctggagaagctgaagaagacagcaacaggctggatgaccacaattaacggcaaggagctgaaggtggagggccagattacctactacaacagatacaagagacagaacgtagtcaaggacctgtccgtcgagctggatagactgagcgaagaatctgtgaacaacgacatctcctcctggacaaagggcagaagcggagaagctctgagcctcctgaagaaaagattctcccatagacccgtgcaggagaagttcgtgtgcctgaactgcggcttcgagacacacgcagccgagcaagccgccctgaacatcgccagatcctggctgttcctgcggagccaggagtacaagaaataccagacaaacaagacaaccggcaacaccgataagagagccttcgtcgagacctggcagtccttttaccggaagaagcttaaggaggtgtggaaacctgccgtgcggtctggcggatctggcggaggctcctgagatgggcctgctgacattcagagacatcgctatcgagttcagcctggaggaatggcaatgtctggactgcgcccagagaaatctgtacagagatgtgatgctggaaaactaccggaacctggtgtctctgggcatcgccgtgtccaagcccgacctgatcacctgcctcgagcagaacaaggaaagccagaacatcaagcggaacaaaatggtcgccaagcaccctgtgatgcacagccacggatctggctccggcagcggccccaagaaaaagagaaaagtctaagctgccttctgcggggcttgccttctggccatgcccttcttctctcccttgcacctgtacctcttggtctttgaataaagcctgagtaggaaggctagcaaaaaaaaaaaaaaaaaaaaaaaaaaaaaaaaaaaaaaaaaaaaaaaaaaaaaaaaaaaaaaaaaaaaaaaaaaaaaaaa

SEQ ID NO: 18538 - RNA, 9485 nt, synthetic construct
  source 1..9485: mol_type = other RNA
aggaaataagagagaaaagaagagtaagaagaaatataagagccaccatggcccctaagaagaagcgtaaagtgagccggatggaacgcctcgtctacgaggtgcggcagaagtgcagaaacatcgaggacatctgcatctcctgcggatctctgaacgtgaccctggagcacccactgttcatcggcggcatgtgccagaactgtaaaaactgttttctggagtgtgcctatcaatacgacgatgacggctaccagagctactgcaccatctgttgcggcggaagagaggtgctgatgtgtggaaataacaactgctgccggtgcttctgcgtggaatgcgtggacctgctggtgggccccggcgccgcccaggccgctattaaggaagatccttggaactgctacatgtgcggccacaagggcacatacggcctgctgagacggagagaggactggcctagcagactgcagatgttcttcgccaataaccacgaccaggagttcgacccccctaaggtgtaccctcccgtccccgccgagaagagaaagcccatccgggtcctgagcctgttcgatggcatcgccaccggtctgctggtgctgaaggacctgggcatccaggtggataggtacattgcctccgaggtgtgcgaggactccatcaccgtgggaatggtgcgtcatcagggcaagatcatgtacgtgggcgacgtgcggagcgtgacacagaagcatatccaggagtggggccctttcgacctggtgatcggcggcagcccttgcaatgacctgagcatcgtgaacccagcccggaagggcctgtacgagggaaccggcagactgttcttcgagttttacagactgctgcacgacgcccggcctaaggaaggcgacgaccggcccttcttttggctgttcgagaatgtggtggccatgggagtcagcgacaagcgggatattagccggttcctggagagcaaccccgtgatgatcgatgccaaggaagtgagcgccgcccaccgggccagatacttctggggcaatctgcctggcatgaacagacccctggccagcaccgtgaacgacaagctggagctgcaggagtgcctggagcacggccggatcgccaagttcagcaaggtgagaaccatcaccacccgaagcaacagcatcaaacaaggcaaggaccagcactttcctgtgttcatgaacgagaaggaggacatcctgtggtgtaccgagatggagagagtgttcgggttcccagtccactacacagatgtcagcaacatgtctagactggccagacagagactgctgggaagaagctggtccgtccctgtgatcagacacctgttcgcccctctgaaggagtacttcgcctgcgtgagcagcggcaacagcaacgccaacagccggggccccagcttctctagcggcctggtgccactgtccctgagagggagccacatgggccccatggagatctacaaaaccgtgagcgcctggaagcggcagcctgtgcgcgtgctgagcctgtttcggaatatcgataaagtcctgaaaagcctgggattcctggagagcggctctggctccggcggtggcaccctgaagtacgtggaggatgtgacaaacgtggtcagacgggatgtggagaagtggggccccttcgatctggtgtacggcagcacccaacccctgggcagctcttgtgaccggtgccctggctggtacatgtttcagttccaccggatcctgcagtacgccctgccgagacaggagtcccagcggccattcttttggattttcatggacaacttgctgctgaccgaggatgaccaggaaactaccactcggttcctgcagaccgaagccgtgaccctgcaggacgtgagaggccgggactaccagaacgccatgcgggtgtggtccaacatccctggactgaaaagcaagcacgcacctctgacccctaaagaagaggagtacctgcaggcccaggtgcggagcagaagcaagctggacgcccctaaggtggatctgctggtgaagaattgcctcctgcccctgagagagtacttcaagtatttcagccagaatagtctgcccctgggaggcagcggcggcggcgccctggtgacatttgaggacgtcgccgtgcggttcacccaggaggaatgggctctgctggatccttctcagaaaatcctgtaccgggacgtgatgagagagacataccggaatctgacctccgtgggcatcaactgggaatgttgggaccttgaagcctgcttcagaagcctgggaagaaacctgagagtgcaggtggtgaagagaaagtgcgagctgaccaacagcggcccctgcgccgagggcggcccaagcagcggcgcccctcctcccagcggcggcagcccagccggctccccaacctctaccgaggagggcacctctgagtccgccacccccgagagcggccctggcacctccaccgagcccagcgagggcagcgcacccggcagccctgccggcagccccacctccacagaggagggaaccagcaccgagcccagcgaaggcagcgccccaggcaccagcaccgagcctagtgagcaggagattaaacggatcaacaagatcagaagaagacttgtgaaagacagcaacaccaagaaggccggcaagacaggccccatgaaaaccctgctggttagagtgatgacacccgatctgagagagcggctggaaaacctgagaaagaagcctgaaaatatcccccagcccatcagcaatacatctagagccaacctgaataagctgctgaccgattacaccgaaatgaagaaggcgatcctgcatgtgtactgggaagagttccagaaggaccctgtgggcctgatgagccgggtggcccagcctgccagcaagaagatcgatcagaacaagctgaaacctgagatggacgagaagggcaacctgaccaccgccggctttgcctgctctcagtgtggccagcccctgttcgtgtacaagctggagcaggtgtctgagaagggcaaggcttacaccaactacttcggacggtgcaatgtggccgagcacgaaaagctgatcctgctggcccagctgaagcccgagaaggatagcgacgaagccgtgacatatagcctgggaaagtttgggcagagggccctggatttctacagcattcatgtgaccaaggagtccacccaccccgtgaagcccctggcccagatcgccggaaacagatacgcctccggacctgtgggaaaggccctgagcgacgcatgtatgggcacaatcgcctccttcctgtctaagtaccaggacatcatcatcgaacaccagaaggtggtgaagggcaaccagaagagactggagagcctgcgggagctggccggcaaggaaaacctggaataccctagcgtgaccctgccacctcagcctcacaccaaggagggcgttgatgcctacaacgaagtgatcgcccgggtgcgaatgtgggtgaacctgaacctgtggcagaagctgaagctaagcagagatgatgccaagcctctgctgagactgaagggattcccttcctttcctctggtcgagagacaggccaacgaagtggactggtgggacatggtgtgtaacgtgaagaagctgatcaacgagaaaaaggaggatggcaaggtgttttggcagaatctggctggctacaagagacaggaagccctgagaccatacctgagcagcgaggaagatcggaagaagggaaagaaattcgctcggtaccagctgggcgacctgctgctgcacctggaaaagaagcacggcgaggactggggaaaggtgtacgacgaggcctgggagcggattgacaagaaagtggaaggcctgagcaagcacatcaagctggaagaggaacggagaagcgaggacgcccagagcaaggccgccctgaccgactggctgcgggctaaggccagcttcgtgatcgagggcctgaaggaggccgacaaggacgagttctgcagatgcgagctgaagctgcagaagtggtacggggacctgcggggaaagcccttcgccatcgaagccgagaacagcatcctggacatcagcggcttcagcaagcagtacaactgtgccttcatctggcagaaggacggcgtgaagaagctgaacctgtacctgatcatcaactacttcaagggcggcaagctgcggttcaagaagatcaaacctgaagccttcgaagccaacagattctacaccgtgatcaacaaaaagagcggcgagatcgtgcccatggaggtgaacttcaacttcgacgaccccaacctgatcatcctgcctctggcctttggcaagagacagggcagagaattcatctggaacgacctgctgtccctggaaaccggcagcctgaagctggccaacggaagagtgatcgagaagacactgtacaacagaagaacccggcaggatgagcctgccctgttcgtggccctgaccttcgagcggcgggaggtcctggactcctccaatatcaaaccaatgaacctgatcggcgtggcaagaggcgaaaacatccccgccgtgatcgccctgaccgaccccgagggctgcccactgagccggtttaaggatagcctgggaaacccaacccacatcctgagaatcggcgagagctataaggagaagcagcggaccatccaggccaagaaggaggtggagcagcggagagccggcggctacagccggaagtacgccagcaaagccaagaatctggcagacgatatggtgagaaacaccgctagagatctgctgtactacgccgtgacccaggatgccatgctgatcttcgccaacctgagccggggcttcggccggcagggcaagcggaccttcatggccgagagacagtacacacggatggaggactggctgaccgccaagctggcctacgagggcctgagcaagacctacctgtccaagacactggcccagtacacctccaagacatgcagcaactgtgggtttaccatcaccagcgccgactacgacagggtgctggagaagctgaagaagacagcaacaggctggatgaccacaattaacggcaaggagctgaaggtggagggccagattacctactacaacagatacaagagacagaacgtagtcaaggacctgtccgtcgagctggatagactgagcgaagaatctgtgaacaacgacatctcctcctggacaaagggcagaagcggagaagctctgagcctcctgaagaaaagattctcccatagacccgtgcaggagaagttcgtgtgcctgaactgcggcttcgagacacacgcagccgagcaagccgccctgaacatcgccagatcctggctgttcctgcggagccaggagtacaagaaataccagacaaacaagacaaccggcaacaccgataagagagccttcgtcgagacctggcagtccttttaccggaagaagcttaaggaggtgtggaaacctgccgtgcggtctggcggatctggcggaggctcctctcaggagagcgtggccttcgaggacgtggccgtctacttcaccaccaaagagtgggccatcatggtgcccgccgagagagccctgtacagagatgtgatgctggaaaactacgaggccgtggcttttgtggccgtgcctcctacaagcaagcccgctctggtgtcccacctggaacagggcaaggaaagctgcttcatccggcctccaggcgtgctgagcagaagcgactggcgggccggaggcggcccaagcagcggcgcccctcctcccagcggcggcagcccagccggctccccaacctctaccgaggagggcacctctgagtccgccacccccgagagcggccctggcacctccaccgagcccagcgagggcagcgcacccggcagccctgccggcagccccacctccacagaggagggaaccagcaccgagcccagcgaaggcagcgccccaggcaccagcaccgagcctagtgagcaggagattaaacggatcaacaagatcagaagaagacttgtgaaagacagcaacaccaagaaggccggcaagacaggccccatgaaaaccctgctggttagagtgatgacacccgatctgagagagcggctggaaaacctgagaaagaagcctgaaaatatcccccagcccatcagcaatacatctagagccaacctgaataagctgctgaccgattacaccgaaatgaagaaggcgatcctgcatgtgtactgggaagagttccagaaggaccctgtgggcctgatgagccgggtggcccagcctgccagcaagaagatcgatcagaacaagctgaaacctgagatggacgagaagggcaacctgaccaccgccggctttgcctgctctcagtgtggccagcccctgttcgtgtacaagctggagcaggtgtctgagaagggcaaggcttacaccaactacttcggacggtgcaatgtggccgagcacgaaaagctgatcctgctggcccagctgaagcccgagaaggatagcgacgaagccgtgacatatagcctgggaaagtttgggcagagggccctggatttctacagcattcatgtgaccaaggagtccacccaccccgtgaagcccctggcccagatcgccggaaacagatacgcctccggacctgtgggaaaggccctgagcgacgcatgtatgggcacaatcgcctccttcctgtctaagtaccaggacatcatcatcgaacaccagaaggtggtgaagggcaaccagaagagactggagagcctgcgggagctggccggcaaggaaaacctggaataccctagcgtgaccctgccacctcagcctcacaccaaggagggcgttgatgcctacaacgaagtgatcgcccgggtgcgaatgtgggtgaacctgaacctgtggcagaagctgaagctaagcagagatgatgccaagcctctgctgagactgaagggattcccttcctttcctctggtcgagagacaggccaacgaagtggactggtgggacatggtgtgtaacgtgaagaagctgatcaacgagaaaaaggaggatggcaaggtgttttggcagaatctggctggctacaagagacaggaagccctgagaccatacctgagcagcgaggaagatcggaagaagggaaagaaattcgctcggtaccagctgggcgacctgctgctgcacctggaaaagaagcacggcgaggactggggaaaggtgtacgacgaggcctgggagcggattgacaagaaagtggaaggcctgagcaagcacatcaagctggaagaggaacggagaagcgaggacgcccagagcaaggccgccctgaccgactggctgcgggctaaggccagcttcgtgatcgagggcctgaaggaggccgacaaggacgagttctgcagatgcgagctgaagctgcagaagtggtacggggacctgcggggaaagcccttcgccatcgaagccgagaacagcatcctggacatcagcggcttcagcaagcagtacaactgtgccttcatctggcagaaggacggcgtgaagaagctgaacctgtacctgatcatcaactacttcaagggcggcaagctgcggttcaagaagatcaaacctgaagccttcgaagccaacagattctacaccgtgatcaacaaaaagagcggcgagatcgtgcccatggaggtgaacttcaacttcgacgaccccaacctgatcatcctgcctctggcctttggcaagagacagggcagagaattcatctggaacgacctgctgtccctggaaaccggcagcctgaagctggccaacggaagagtgatcgagaagacactgtacaacagaagaacccggcaggatgagcctgccctgttcgtggccctgaccttcgagcggcgggaggtcctggactcctccaatatcaaaccaatgaacctgatcggcgtggcaagaggcgaaaacatccccgccgtgatcgccctgaccgaccccgagggctgcccactgagccggtttaaggatagcctgggaaacccaacccacatcctgagaatcggcgagagctataaggagaagcagcggaccatccaggccaagaaggaggtggagcagcggagagccggcggctacagccggaagtacgccagcaaagccaagaatctggcagacgatatggtgagaaacaccgctagagatctgctgtactacgccgtgacccaggatgccatgctgatcttcgccaacctgagccggggcttcggccggcagggcaagcggaccttcatggccgagagacagtacacacggatggaggactggctgaccgccaagctggcctacgagggcctgagcaagacctacctgtccaagacactggcccagtacacctccaagacatgcagcaactgtgggtttaccatcaccagcgccgactacgacagggtgctggagaagctgaagaagacagcaacaggctggatgaccacaattaacggcaaggagctgaaggtggagggccagattacctactacaacagatacaagagacagaacgtagtcaaggacctgtccgtcgagctggatagactgagcgaagaatctgtgaacaacgacatctcctcctggacaaagggcagaagcggagaagctctgagcctcctgaagaaaagattctcccatagacccgtgcaggagaagttcgtgtgcctgaactgcggcttcgagacacacgcagccgagcaagccgccctgaacatcgccagatcctggctgttcctgcggagccaggagtacaagaaataccagacaaacaagacaaccggcaacaccgataagagagccttcgtcgagacctggcagtccttttaccggaagaagcttaaggaggtgtggaaacctgccgtgcggtctggcggatctggcggaggctcctctgctgaccttcgaggacgtcgccgtgtccttcagcgaggaagaatgggagctgctcgatcctcctcagaaaaccctgtacaacgacgtgatgcaagagaactacgagacagtgatctctctgggcctgaagctgaagaacgacaccggaaatgatcagcccatcagcatcagcgccctggaaatgcaggccagcggcagcaaggtgctgcggaaggccagaatgaaagtggctcagaagacaggatctggctccggcagcggccccaagaaaaagagaaaagtctaagctgccttctgcggggcttgccttctggccatgcccttcttctctcccttgcacctgtacctcttggtctttgaataaagcctgagtaggaaggctagcaaaaaaaaaaaaaaaaaaaaaaaaaaaaaaaaaaaaaaaaaaaaaaaaaaaaaaaaaaaaaaaaaaaaaaaaaaaaaaaa

SEQ ID NO: 18539 - RNA, 9485 nt, synthetic construct
  source 1..9485: mol_type = other RNA
aggaaataagagagaaaagaagagtaagaagaaatataagagccaccatggcccctaagaagaagcgtaaagtgagccggatggaacgcctcgtctacgaggtgcggcagaagtgcagaaacatcgaggacatctgcatctcctgcggatctctgaacgtgaccctggagcacccactgttcatcggcggcatgtgccagaactgtaaaaactgttttctggagtgtgcctatcaatacgacgatgacggctaccagagctactgcaccatctgttgcggcggaagagaggtgctgatgtgtggaaataacaactgctgccggtgcttctgcgtggaatgcgtggacctgctggtgggccccggcgccgcccaggccgctattaaggaagatccttggaactgctacatgtgcggccacaagggcacatacggcctgctgagacggagagaggactggcctagcagactgcagatgttcttcgccaataaccacgaccaggagttcgacccccctaaggtgtaccctcccgtccccgccgagaagagaaagcccatccgggtcctgagcctgttcgatggcatcgccaccggtctgctggtgctgaaggacctgggcatccaggtggataggtacattgcctccgaggtgtgcgaggactccatcaccgtgggaatggtgcgtcatcagggcaagatcatgtacgtgggcgacgtgcggagcgtgacacagaagcatatccaggagtggggccctttcgacctggtgatcggcggcagcccttgcaatgacctgagcatcgtgaacccagcccggaagggcctgtacgagggaaccggcagactgttcttcgagttttacagactgctgcacgacgcccggcctaaggaaggcgacgaccggcccttcttttggctgttcgagaatgtggtggccatgggagtcagcgacaagcgggatattagccggttcctggagagcaaccccgtgatgatcgatgccaaggaagtgagcgccgcccaccgggccagatacttctggggcaatctgcctggcatgaacagacccctggccagcaccgtgaacgacaagctggagctgcaggagtgcctggagcacggccggatcgccaagttcagcaaggtgagaaccatcaccacccgaagcaacagcatcaaacaaggcaaggaccagcactttcctgtgttcatgaacgagaaggaggacatcctgtggtgtaccgagatggagagagtgttcgggttcccagtccactacacagatgtcagcaacatgtctagactggccagacagagactgctgggaagaagctggtccgtccctgtgatcagacacctgttcgcccctctgaaggagtacttcgcctgcgtgagcagcggcaacagcaacgccaacagccggggccccagcttctctagcggcctggtgccactgtccctgagagggagccacatgggccccatggagatctacaaaaccgtgagcgcctggaagcggcagcctgtgcgcgtgctgagcctgtttcggaatatcgataaagtcctgaaaagcctgggattcctggagagcggctctggctccggcggtggcaccctgaagtacgtggaggatgtgacaaacgtggtcagacgggatgtggagaagtggggccccttcgatctggtgtacggcagcacccaacccctgggcagctcttgtgaccggtgccctggctggtacatgtttcagttccaccggatcctgcagtacgccctgccgagacaggagtcccagcggccattcttttggattttcatggacaacttgctgctgaccgaggatgaccaggaaactaccactcggttcctgcagaccgaagccgtgaccctgcaggacgtgagaggccgggactaccagaacgccatgcgggtgtggtccaacatccctggactgaaaagcaagcacgcacctctgacccctaaagaagaggagtacctgcaggcccaggtgcggagcagaagcaagctggacgcccctaaggtggatctgctggtgaagaattgcctcctgcccctgagagagtacttcaagtatttcagccagaatagtctgcccctgggaggcagcggcggcggcgccctggtgacatttgaggacgtcgccgtgcggttcacccaggaggaatgggctctgctggatccttctcagaaaatcctgtaccgggacgtgatgagagagacataccggaatctgacctccgtgggcatcaactgggaatgttgggaccttgaagcctgcttcagaagcctgggaagaaacctgagagtgcaggtggtgaagagaaagtgcgagctgaccaacagcggcccctgcgccgagggcggcccaagcagcggcgcccctcctcccagcggcggcagcccagccggctccccaacctctaccgaggagggcacctctgagtccgccacccccgagagcggccctggcacctccaccgagcccagcgagggcagcgcacccggcagccctgccggcagccccacctccacagaggagggaaccagcaccgagcccagcgaaggcagcgccccaggcaccagcaccgagcctagtgagcaggagattaaacggatcaacaagatcagaagaagacttgtgaaagacagcaacaccaagaaggccggcaagacaggccccatgaaaaccctgctggttagagtgatgacacccgatctgagagagcggctggaaaacctgagaaagaagcctgaaaatatcccccagcccatcagcaatacatctagagccaacctgaataagctgctgaccgattacaccgaaatgaagaaggcgatcctgcatgtgtactgggaagagttccagaaggaccctgtgggcctgatgagccgggtggcccagcctgccagcaagaagatcgatcagaacaagctgaaacctgagatggacgagaagggcaacctgaccaccgccggctttgcctgctctcagtgtggccagcccctgttcgtgtacaagctggagcaggtgtctgagaagggcaaggcttacaccaactacttcggacggtgcaatgtggccgagcacgaaaagctgatcctgctggcccagctgaagcccgagaaggatagcgacgaagccgtgacatatagcctgggaaagtttgggcagagggccctggatttctacagcattcatgtgaccaaggagtccacccaccccgtgaagcccctggcccagatcgccggaaacagatacgcctccggacctgtgggaaaggccctgagcgacgcatgtatgggcacaatcgcctccttcctgtctaagtaccaggacatcatcatcgaacaccagaaggtggtgaagggcaaccagaagagactggagagcctgcgggagctggccggcaaggaaaacctggaataccctagcgtgaccctgccacctcagcctcacaccaaggagggcgttgatgcctacaacgaagtgatcgcccgggtgcgaatgtgggtgaacctgaacctgtggcagaagctgaagctaagcagagatgatgccaagcctctgctgagactgaagggattcccttcctttcctctggtcgagagacaggccaacgaagtggactggtgggacatggtgtgtaacgtgaagaagctgatcaacgagaaaaaggaggatggcaaggtgttttggcagaatctggctggctacaagagacaggaagccctgagaccatacctgagcagcgaggaagatcggaagaagggaaagaaattcgctcggtaccagctgggcgacctgctgctgcacctggaaaagaagcacggcgaggactggggaaaggtgtacgacgaggcctgggagcggattgacaagaaagtggaaggcctgagcaagcacatcaagctggaagaggaacggagaagcgaggacgcccagagcaaggccgccctgaccgactggctgcgggctaaggccagcttcgtgatcgagggcctgaaggaggccgacaaggacgagttctgcagatgcgagctgaagctgcagaagtggtacggggacctgcggggaaagcccttcgccatcgaagccgagaacagcatcctggacatcagcggcttcagcaagcagtacaactgtgccttcatctggcagaaggacggcgtgaagaagctgaacctgtacctgatcatcaactacttcaagggcggcaagctgcggttcaagaagatcaaacctgaagccttcgaagccaacagattctacaccgtgatcaacaaaaagagcggcgagatcgtgcccatggaggtgaacttcaacttcgacgaccccaacctgatcatcctgcctctggcctttggcaagagacagggcagagaattcatctggaacgacctgctgtccctggaaaccggcagcctgaagctggccaacggaagagtgatcgagaagacactgtacaacagaagaacccggcaggatgagcctgccctgttcgtggccctgaccttcgagcggcgggaggtcctggactcctccaatatcaaaccaatgaacctgatcggcgtggcaagaggcgaaaacatccccgccgtgatcgccctgaccgaccccgagggctgcccactgagccggtttaaggatagcctgggaaacccaacccacatcctgagaatcggcgagagctataaggagaagcagcggaccatccaggccaagaaggaggtggagcagcggagagccggcggctacagccggaagtacgccagcaaagccaagaatctggcagacgatatggtgagaaacaccgctagagatctgctgtactacgccgtgacccaggatgccatgctgatcttcgccaacctgagccggggcttcggccggcagggcaagcggaccttcatggccgagagacagtacacacggatggaggactggctgaccgccaagctggcctacgagggcctgagcaagacctacctgtccaagacactggcccagtacacctccaagacatgcagcaactgtgggtttaccatcaccagcgccgactacgacagggtgctggagaagctgaagaagacagcaacaggctggatgaccacaattaacggcaaggagctgaaggtggagggccagattacctactacaacagatacaagagacagaacgtagtcaaggacctgtccgtcgagctggatagactgagcgaagaatctgtgaacaacgacatctcctcctggacaaagggcagaagcggagaagctctgagcctcctgaagaaaagattctcccatagacccgtgcaggagaagttcgtgtgcctgaactgcggcttcgagacacacgcagccgagcaagccgccctgaacatcgccagatcctggctgttcctgcggagccaggagtacaagaaataccagacaaacaagacaaccggcaacaccgataagagagccttcgtcgagacctggcagtccttttaccggaagaagcttaaggaggtgtggaaacctgccgtgcggtctggcggatctggcggaggctcctctaaagcccctatcacattcggcgacctggccatctacttcagccaggaggaatgggagtggctgagccccatccagaaggacctgtacgaggacgtgatgctggaaaactacagaaatctggtgtccctgggcctcagctttagacgccccaacgtgatcaccctgctggaaaagggcaaggccccatggatggtcgagcctgctagacggcggagaggacctgatagcggcagcaaggtgggcggcccaagcagcggcgcccctcctcccagcggcggcagcccagccggctccccaacctctaccgaggagggcacctctgagtccgccacccccgagagcggccctggcacctccaccgagcccagcgagggcagcgcacccggcagccctgccggcagccccacctccacagaggagggaaccagcaccgagcccagcgaaggcagcgccccaggcaccagcaccgagcctagtgagcaggagattaaacggatcaacaagatcagaagaagacttgtgaaagacagcaacaccaagaaggccggcaagacaggccccatgaaaaccctgctggttagagtgatgacacccgatctgagagagcggctggaaaacctgagaaagaagcctgaaaatatcccccagcccatcagcaatacatctagagccaacctgaataagctgctgaccgattacaccgaaatgaagaaggcgatcctgcatgtgtactgggaagagttccagaaggaccctgtgggcctgatgagccgggtggcccagcctgccagcaagaagatcgatcagaacaagctgaaacctgagatggacgagaagggcaacctgaccaccgccggctttgcctgctctcagtgtggccagcccctgttcgtgtacaagctggagcaggtgtctgagaagggcaaggcttacaccaactacttcggacggtgcaatgtggccgagcacgaaaagctgatcctgctggcccagctgaagcccgagaaggatagcgacgaagccgtgacatatagcctgggaaagtttgggcagagggccctggatttctacagcattcatgtgaccaaggagtccacccaccccgtgaagcccctggcccagatcgccggaaacagatacgcctccggacctgtgggaaaggccctgagcgacgcatgtatgggcacaatcgcctccttcctgtctaagtaccaggacatcatcatcgaacaccagaaggtggtgaagggcaaccagaagagactggagagcctgcgggagctggccggcaaggaaaacctggaataccctagcgtgaccctgccacctcagcctcacaccaaggagggcgttgatgcctacaacgaagtgatcgcccgggtgcgaatgtgggtgaacctgaacctgtggcagaagctgaagctaagcagagatgatgccaagcctctgctgagactgaagggattcccttcctttcctctggtcgagagacaggccaacgaagtggactggtgggacatggtgtgtaacgtgaagaagctgatcaacgagaaaaaggaggatggcaaggtgttttggcagaatctggctggctacaagagacaggaagccctgagaccatacctgagcagcgaggaagatcggaagaagggaaagaaattcgctcggtaccagctgggcgacctgctgctgcacctggaaaagaagcacggcgaggactggggaaaggtgtacgacgaggcctgggagcggattgacaagaaagtggaaggcctgagcaagcacatcaagctggaagaggaacggagaagcgaggacgcccagagcaaggccgccctgaccgactggctgcgggctaaggccagcttcgtgatcgagggcctgaaggaggccgacaaggacgagttctgcagatgcgagctgaagctgcagaagtggtacggggacctgcggggaaagcccttcgccatcgaagccgagaacagcatcctggacatcagcggcttcagcaagcagtacaactgtgccttcatctggcagaaggacggcgtgaagaagctgaacctgtacctgatcatcaactacttcaagggcggcaagctgcggttcaagaagatcaaacctgaagccttcgaagccaacagattctacaccgtgatcaacaaaaagagcggcgagatcgtgcccatggaggtgaacttcaacttcgacgaccccaacctgatcatcctgcctctggcctttggcaagagacagggcagagaattcatctggaacgacctgctgtccctggaaaccggcagcctgaagctggccaacggaagagtgatcgagaagacactgtacaacagaagaacccggcaggatgagcctgccctgttcgtggccctgaccttcgagcggcgggaggtcctggactcctccaatatcaaaccaatgaacctgatcggcgtggcaagaggcgaaaacatccccgccgtgatcgccctgaccgaccccgagggctgcccactgagccggtttaaggatagcctgggaaacccaacccacatcctgagaatcggcgagagctataaggagaagcagcggaccatccaggccaagaaggaggtggagcagcggagagccggcggctacagccggaagtacgccagcaaagccaagaatctggcagacgatatggtgagaaacaccgctagagatctgctgtactacgccgtgacccaggatgccatgctgatcttcgccaacctgagccggggcttcggccggcagggcaagcggaccttcatggccgagagacagtacacacggatggaggactggctgaccgccaagctggcctacgagggcctgagcaagacctacctgtccaagacactggcccagtacacctccaagacatgcagcaactgtgggtttaccatcaccagcgccgactacgacagggtgctggagaagctgaagaagacagcaacaggctggatgaccacaattaacggcaaggagctgaaggtggagggccagattacctactacaacagatacaagagacagaacgtagtcaaggacctgtccgtcgagctggatagactgagcgaagaatctgtgaacaacgacatctcctcctggacaaagggcagaagcggagaagctctgagcctcctgaagaaaagattctcccatagacccgtgcaggagaagttcgtgtgcctgaactgcggcttcgagacacacgcagccgagcaagccgccctgaacatcgccagatcctggctgttcctgcggagccaggagtacaagaaataccagacaaacaagacaaccggcaacaccgataagagagccttcgtcgagacctggcagtccttttaccggaagaagcttaaggaggtgtggaaacctgccgtgcggtctggcggatctggcggaggctcctgccctggtgacatttgaggacgtcgccgtgcggttcacccaggaggaatgggctctgctggatccttctcagaaaatcctgtaccgggacgtgatgagagagacataccggaatctgacctccgtgggcatcaactgggaatgttgggaccttgaagcctgcttcagaagcctgggaagaaacctgagagtgcaggtggtgaagagaaagtgcgagctgaccaacagcggcccctgcgccgagggatctggctccggcagcggccccaagaaaaagagaaaagtctaagctgccttctgcggggcttgccttctggccatgcccttcttctctcccttgcacctgtacctcttggtctttgaataaagcctgagtaggaaggctagcaaaaaaaaaaaaaaaaaaaaaaaaaaaaaaaaaaaaaaaaaaaaaaaaaaaaaaaaaaaaaaaaaaaaaaaaaaaaaaaa

SEQ ID NO: 18540 - RNA, 9485 nt, synthetic construct
  source 1..9485: mol_type = other RNA
aggaaataagagagaaaagaagagtaagaagaaatataagagccaccatggcccctaagaagaagcgtaaagtgagccggatggaacgcctcgtctacgaggtgcggcagaagtgcagaaacatcgaggacatctgcatctcctgcggatctctgaacgtgaccctggagcacccactgttcatcggcggcatgtgccagaactgtaaaaactgttttctggagtgtgcctatcaatacgacgatgacggctaccagagctactgcaccatctgttgcggcggaagagaggtgctgatgtgtggaaataacaactgctgccggtgcttctgcgtggaatgcgtggacctgctggtgggccccggcgccgcccaggccgctattaaggaagatccttggaactgctacatgtgcggccacaagggcacatacggcctgctgagacggagagaggactggcctagcagactgcagatgttcttcgccaataaccacgaccaggagttcgacccccctaaggtgtaccctcccgtccccgccgagaagagaaagcccatccgggtcctgagcctgttcgatggcatcgccaccggtctgctggtgctgaaggacctgggcatccaggtggataggtacattgcctccgaggtgtgcgaggactccatcaccgtgggaatggtgcgtcatcagggcaagatcatgtacgtgggcgacgtgcggagcgtgacacagaagcatatccaggagtggggccctttcgacctggtgatcggcggcagcccttgcaatgacctgagcatcgtgaacccagcccggaagggcctgtacgagggaaccggcagactgttcttcgagttttacagactgctgcacgacgcccggcctaaggaaggcgacgaccggcccttcttttggctgttcgagaatgtggtggccatgggagtcagcgacaagcgggatattagccggttcctggagagcaaccccgtgatgatcgatgccaaggaagtgagcgccgcccaccgggccagatacttctggggcaatctgcctggcatgaacagacccctggccagcaccgtgaacgacaagctggagctgcaggagtgcctggagcacggccggatcgccaagttcagcaaggtgagaaccatcaccacccgaagcaacagcatcaaacaaggcaaggaccagcactttcctgtgttcatgaacgagaaggaggacatcctgtggtgtaccgagatggagagagtgttcgggttcccagtccactacacagatgtcagcaacatgtctagactggccagacagagactgctgggaagaagctggtccgtccctgtgatcagacacctgttcgcccctctgaaggagtacttcgcctgcgtgagcagcggcaacagcaacgccaacagccggggccccagcttctctagcggcctggtgccactgtccctgagagggagccacatgggccccatggagatctacaaaaccgtgagcgcctggaagcggcagcctgtgcgcgtgctgagcctgtttcggaatatcgataaagtcctgaaaagcctgggattcctggagagcggctctggctccggcggtggcaccctgaagtacgtggaggatgtgacaaacgtggtcagacgggatgtggagaagtggggccccttcgatctggtgtacggcagcacccaacccctgggcagctcttgtgaccggtgccctggctggtacatgtttcagttccaccggatcctgcagtacgccctgccgagacaggagtcccagcggccattcttttggattttcatggacaacttgctgctgaccgaggatgaccaggaaactaccactcggttcctgcagaccgaagccgtgaccctgcaggacgtgagaggccgggactaccagaacgccatgcgggtgtggtccaacatccctggactgaaaagcaagcacgcacctctgacccctaaagaagaggagtacctgcaggcccaggtgcggagcagaagcaagctggacgcccctaaggtggatctgctggtgaagaattgcctcctgcccctgagagagtacttcaagtatttcagccagaatagtctgcccctgggaggcagcggcggcggcgccctggtgacatttgaggacgtcgccgtgcggttcacccaggaggaatgggctctgctggatccttctcagaaaatcctgtaccgggacgtgatgagagagacataccggaatctgacctccgtgggcatcaactgggaatgttgggaccttgaagcctgcttcagaagcctgggaagaaacctgagagtgcaggtggtgaagagaaagtgcgagctgaccaacagcggcccctgcgccgagggcggcccaagcagcggcgcccctcctcccagcggcggcagcccagccggctccccaacctctaccgaggagggcacctctgagtccgccacccccgagagcggccctggcacctccaccgagcccagcgagggcagcgcacccggcagccctgccggcagccccacctccacagaggagggaaccagcaccgagcccagcgaaggcagcgccccaggcaccagcaccgagcctagtgagcaggagattaaacggatcaacaagatcagaagaagacttgtgaaagacagcaacaccaagaaggccggcaagacaggccccatgaaaaccctgctggttagagtgatgacacccgatctgagagagcggctggaaaacctgagaaagaagcctgaaaatatcccccagcccatcagcaatacatctagagccaacctgaataagctgctgaccgattacaccgaaatgaagaaggcgatcctgcatgtgtactgggaagagttccagaaggaccctgtgggcctgatgagccgggtggcccagcctgccagcaagaagatcgatcagaacaagctgaaacctgagatggacgagaagggcaacctgaccaccgccggctttgcctgctctcagtgtggccagcccctgttcgtgtacaagctggagcaggtgtctgagaagggcaaggcttacaccaactacttcggacggtgcaatgtggccgagcacgaaaagctgatcctgctggcccagctgaagcccgagaaggatagcgacgaagccgtgacatatagcctgggaaagtttgggcagagggccctggatttctacagcattcatgtgaccaaggagtccacccaccccgtgaagcccctggcccagatcgccggaaacagatacgcctccggacctgtgggaaaggccctgagcgacgcatgtatgggcacaatcgcctccttcctgtctaagtaccaggacatcatcatcgaacaccagaaggtggtgaagggcaaccagaagagactggagagcctgcgggagctggccggcaaggaaaacctggaataccctagcgtgaccctgccacctcagcctcacaccaaggagggcgttgatgcctacaacgaagtgatcgcccgggtgcgaatgtgggtgaacctgaacctgtggcagaagctgaagctaagcagagatgatgccaagcctctgctgagactgaagggattcccttcctttcctctggtcgagagacaggccaacgaagtggactggtgggacatggtgtgtaacgtgaagaagctgatcaacgagaaaaaggaggatggcaaggtgttttggcagaatctggctggctacaagagacaggaagccctgagaccatacctgagcagcgaggaagatcggaagaagggaaagaaattcgctcggtaccagctgggcgacctgctgctgcacctggaaaagaagcacggcgaggactggggaaaggtgtacgacgaggcctgggagcggattgacaagaaagtggaaggcctgagcaagcacatcaagctggaagaggaacggagaagcgaggacgcccagagcaaggccgccctgaccgactggctgcgggctaaggccagcttcgtgatcgagggcctgaaggaggccgacaaggacgagttctgcagatgcgagctgaagctgcagaagtggtacggggacctgcggggaaagcccttcgccatcgaagccgagaacagcatcctggacatcagcggcttcagcaagcagtacaactgtgccttcatctggcagaaggacggcgtgaagaagctgaacctgtacctgatcatcaactacttcaagggcggcaagctgcggttcaagaagatcaaacctgaagccttcgaagccaacagattctacaccgtgatcaacaaaaagagcggcgagatcgtgcccatggaggtgaacttcaacttcgacgaccccaacctgatcatcctgcctctggcctttggcaagagacagggcagagaattcatctggaacgacctgctgtccctggaaaccggcagcctgaagctggccaacggaagagtgatcgagaagacactgtacaacagaagaacccggcaggatgagcctgccctgttcgtggccctgaccttcgagcggcgggaggtcctggactcctccaatatcaaaccaatgaacctgatcggcgtggcaagaggcgaaaacatccccgccgtgatcgccctgaccgaccccgagggctgcccactgagccggtttaaggatagcctgggaaacccaacccacatcctgagaatcggcgagagctataaggagaagcagcggaccatccaggccaagaaggaggtggagcagcggagagccggcggctacagccggaagtacgccagcaaagccaagaatctggcagacgatatggtgagaaacaccgctagagatctgctgtactacgccgtgacccaggatgccatgctgatcttcgccaacctgagccggggcttcggccggcagggcaagcggaccttcatggccgagagacagtacacacggatggaggactggctgaccgccaagctggcctacgagggcctgagcaagacctacctgtccaagacactggcccagtacacctccaagacatgcagcaactgtgggtttaccatcaccagcgccgactacgacagggtgctggagaagctgaagaagacagcaacaggctggatgaccacaattaacggcaaggagctgaaggtggagggccagattacctactacaacagatacaagagacagaacgtagtcaaggacctgtccgtcgagctggatagactgagcgaagaatctgtgaacaacgacatctcctcctggacaaagggcagaagcggagaagctctgagcctcctgaagaaaagattctcccatagacccgtgcaggagaagttcgtgtgcctgaactgcggcttcgagacacacgcagccgagcaagccgccctgaacatcgccagatcctggctgttcctgcggagccaggagtacaagaaataccagacaaacaagacaaccggcaacaccgataagagagccttcgtcgagacctggcagtccttttaccggaagaagcttaaggaggtgtggaaacctgccgtgcggtctggcggatctggcggaggctcctctaaagcccctatcacattcggcgacctggccatctacttcagccaggaggaatgggagtggctgagccccatccagaaggacctgtacgaggacgtgatgctggaaaactacagaaatctggtgtccctgggcctcagctttagacgccccaacgtgatcaccctgctggaaaagggcaaggccccatggatggtcgagcctgctagacggcggagaggacctgatagcggcagcaaggtgggcggcccaagcagcggcgcccctcctcccagcggcggcagcccagccggctccccaacctctaccgaggagggcacctctgagtccgccacccccgagagcggccctggcacctccaccgagcccagcgagggcagcgcacccggcagccctgccggcagccccacctccacagaggagggaaccagcaccgagcccagcgaaggcagcgccccaggcaccagcaccgagcctagtgagcaggagattaaacggatcaacaagatcagaagaagacttgtgaaagacagcaacaccaagaaggccggcaagacaggccccatgaaaaccctgctggttagagtgatgacacccgatctgagagagcggctggaaaacctgagaaagaagcctgaaaatatcccccagcccatcagcaatacatctagagccaacctgaataagctgctgaccgattacaccgaaatgaagaaggcgatcctgcatgtgtactgggaagagttccagaaggaccctgtgggcctgatgagccgggtggcccagcctgccagcaagaagatcgatcagaacaagctgaaacctgagatggacgagaagggcaacctgaccaccgccggctttgcctgctctcagtgtggccagcccctgttcgtgtacaagctggagcaggtgtctgagaagggcaaggcttacaccaactacttcggacggtgcaatgtggccgagcacgaaaagctgatcctgctggcccagctgaagcccgagaaggatagcgacgaagccgtgacatatagcctgggaaagtttgggcagagggccctggatttctacagcattcatgtgaccaaggagtccacccaccccgtgaagcccctggcccagatcgccggaaacagatacgcctccggacctgtgggaaaggccctgagcgacgcatgtatgggcacaatcgcctccttcctgtctaagtaccaggacatcatcatcgaacaccagaaggtggtgaagggcaaccagaagagactggagagcctgcgggagctggccggcaaggaaaacctggaataccctagcgtgaccctgccacctcagcctcacaccaaggagggcgttgatgcctacaacgaagtgatcgcccgggtgcgaatgtgggtgaacctgaacctgtggcagaagctgaagctaagcagagatgatgccaagcctctgctgagactgaagggattcccttcctttcctctggtcgagagacaggccaacgaagtggactggtgggacatggtgtgtaacgtgaagaagctgatcaacgagaaaaaggaggatggcaaggtgttttggcagaatctggctggctacaagagacaggaagccctgagaccatacctgagcagcgaggaagatcggaagaagggaaagaaattcgctcggtaccagctgggcgacctgctgctgcacctggaaaagaagcacggcgaggactggggaaaggtgtacgacgaggcctgggagcggattgacaagaaagtggaaggcctgagcaagcacatcaagctggaagaggaacggagaagcgaggacgcccagagcaaggccgccctgaccgactggctgcgggctaaggccagcttcgtgatcgagggcctgaaggaggccgacaaggacgagttctgcagatgcgagctgaagctgcagaagtggtacggggacctgcggggaaagcccttcgccatcgaagccgagaacagcatcctggacatcagcggcttcagcaagcagtacaactgtgccttcatctggcagaaggacggcgtgaagaagctgaacctgtacctgatcatcaactacttcaagggcggcaagctgcggttcaagaagatcaaacctgaagccttcgaagccaacagattctacaccgtgatcaacaaaaagagcggcgagatcgtgcccatggaggtgaacttcaacttcgacgaccccaacctgatcatcctgcctctggcctttggcaagagacagggcagagaattcatctggaacgacctgctgtccctggaaaccggcagcctgaagctggccaacggaagagtgatcgagaagacactgtacaacagaagaacccggcaggatgagcctgccctgttcgtggccctgaccttcgagcggcgggaggtcctggactcctccaatatcaaaccaatgaacctgatcggcgtggcaagaggcgaaaacatccccgccgtgatcgccctgaccgaccccgagggctgcccactgagccggtttaaggatagcctgggaaacccaacccacatcctgagaatcggcgagagctataaggagaagcagcggaccatccaggccaagaaggaggtggagcagcggagagccggcggctacagccggaagtacgccagcaaagccaagaatctggcagacgatatggtgagaaacaccgctagagatctgctgtactacgccgtgacccaggatgccatgctgatcttcgccaacctgagccggggcttcggccggcagggcaagcggaccttcatggccgagagacagtacacacggatggaggactggctgaccgccaagctggcctacgagggcctgagcaagacctacctgtccaagacactggcccagtacacctccaagacatgcagcaactgtgggtttaccatcaccagcgccgactacgacagggtgctggagaagctgaagaagacagcaacaggctggatgaccacaattaacggcaaggagctgaaggtggagggccagattacctactacaacagatacaagagacagaacgtagtcaaggacctgtccgtcgagctggatagactgagcgaagaatctgtgaacaacgacatctcctcctggacaaagggcagaagcggagaagctctgagcctcctgaagaaaagattctcccatagacccgtgcaggagaagttcgtgtgcctgaactgcggcttcgagacacacgcagccgagcaagccgccctgaacatcgccagatcctggctgttcctgcggagccaggagtacaagaaataccagacaaacaagacaaccggcaacaccgataagagagccttcgtcgagacctggcagtccttttaccggaagaagcttaaggaggtgtggaaacctgccgtgcggtctggcggatctggcggaggctccttctacacctgtgaccttcgaggatgtggtggtctacttcaccgccgctgagtgggtgcacctgacaaactggcaaagagatttttatcaggccgtgatgatggaaacctacgagctggtggccagcgtggctggcgacggcgttccaatggccgaggacgaggaaggcggagtggaaagacccgtgtggcagtacatccccagaggcaagcggcggagaaagacccctcagcctcgcgccgacggatctggctccggcagcggccccaagaaaaagagaaaagtctaagctgccttctgcggggcttgccttctggccatgcccttcttctctcccttgcacctgtacctcttggtctttgaataaagcctgagtaggaaggctagcaaaaaaaaaaaaaaaaaaaaaaaaaaaaaaaaaaaaaaaaaaaaaaaaaaaaaaaaaaaaaaaaaaaaaaaaaaaaaaaa

SEQ ID NO: 18541 - RNA, 9485 nt, synthetic construct
  source 1..9485: mol_type = other RNA
aggaaataagagagaaaagaagagtaagaagaaatataagagccaccatggcccctaagaagaagcgtaaagtgagccggatggaacgcctcgtctacgaggtgcggcagaagtgcagaaacatcgaggacatctgcatctcctgcggatctctgaacgtgaccctggagcacccactgttcatcggcggcatgtgccagaactgtaaaaactgttttctggagtgtgcctatcaatacgacgatgacggctaccagagctactgcaccatctgttgcggcggaagagaggtgctgatgtgtggaaataacaactgctgccggtgcttctgcgtggaatgcgtggacctgctggtgggccccggcgccgcccaggccgctattaaggaagatccttggaactgctacatgtgcggccacaagggcacatacggcctgctgagacggagagaggactggcctagcagactgcagatgttcttcgccaataaccacgaccaggagttcgacccccctaaggtgtaccctcccgtccccgccgagaagagaaagcccatccgggtcctgagcctgttcgatggcatcgccaccggtctgctggtgctgaaggacctgggcatccaggtggataggtacattgcctccgaggtgtgcgaggactccatcaccgtgggaatggtgcgtcatcagggcaagatcatgtacgtgggcgacgtgcggagcgtgacacagaagcatatccaggagtggggccctttcgacctggtgatcggcggcagcccttgcaatgacctgagcatcgtgaacccagcccggaagggcctgtacgagggaaccggcagactgttcttcgagttttacagactgctgcacgacgcccggcctaaggaaggcgacgaccggcccttcttttggctgttcgagaatgtggtggccatgggagtcagcgacaagcgggatattagccggttcctggagagcaaccccgtgatgatcgatgccaaggaagtgagcgccgcccaccgggccagatacttctggggcaatctgcctggcatgaacagacccctggccagcaccgtgaacgacaagctggagctgcaggagtgcctggagcacggccggatcgccaagttcagcaaggtgagaaccatcaccacccgaagcaacagcatcaaacaaggcaaggaccagcactttcctgtgttcatgaacgagaaggaggacatcctgtggtgtaccgagatggagagagtgttcgggttcccagtccactacacagatgtcagcaacatgtctagactggccagacagagactgctgggaagaagctggtccgtccctgtgatcagacacctgttcgcccctctgaaggagtacttcgcctgcgtgagcagcggcaacagcaacgccaacagccggggccccagcttctctagcggcctggtgccactgtccctgagagggagccacatgggccccatggagatctacaaaaccgtgagcgcctggaagcggcagcctgtgcgcgtgctgagcctgtttcggaatatcgataaagtcctgaaaagcctgggattcctggagagcggctctggctccggcggtggcaccctgaagtacgtggaggatgtgacaaacgtggtcagacgggatgtggagaagtggggccccttcgatctggtgtacggcagcacccaacccctgggcagctcttgtgaccggtgccctggctggtacatgtttcagttccaccggatcctgcagtacgccctgccgagacaggagtcccagcggccattcttttggattttcatggacaacttgctgctgaccgaggatgaccaggaaactaccactcggttcctgcagaccgaagccgtgaccctgcaggacgtgagaggccgggactaccagaacgccatgcgggtgtggtccaacatccctggactgaaaagcaagcacgcacctctgacccctaaagaagaggagtacctgcaggcccaggtgcggagcagaagcaagctggacgcccctaaggtggatctgctggtgaagaattgcctcctgcccctgagagagtacttcaagtatttcagccagaatagtctgcccctgggaggcagcggcggcggcgccctggtgacatttgaggacgtcgccgtgcggttcacccaggaggaatgggctctgctggatccttctcagaaaatcctgtaccgggacgtgatgagagagacataccggaatctgacctccgtgggcatcaactgggaatgttgggaccttgaagcctgcttcagaagcctgggaagaaacctgagagtgcaggtggtgaagagaaagtgcgagctgaccaacagcggcccctgcgccgagggcggcccaagcagcggcgcccctcctcccagcggcggcagcccagccggctccccaacctctaccgaggagggcacctctgagtccgccacccccgagagcggccctggcacctccaccgagcccagcgagggcagcgcacccggcagccctgccggcagccccacctccacagaggagggaaccagcaccgagcccagcgaaggcagcgccccaggcaccagcaccgagcctagtgagcaggagattaaacggatcaacaagatcagaagaagacttgtgaaagacagcaacaccaagaaggccggcaagacaggccccatgaaaaccctgctggttagagtgatgacacccgatctgagagagcggctggaaaacctgagaaagaagcctgaaaatatcccccagcccatcagcaatacatctagagccaacctgaataagctgctgaccgattacaccgaaatgaagaaggcgatcctgcatgtgtactgggaagagttccagaaggaccctgtgggcctgatgagccgggtggcccagcctgccagcaagaagatcgatcagaacaagctgaaacctgagatggacgagaagggcaacctgaccaccgccggctttgcctgctctcagtgtggccagcccctgttcgtgtacaagctggagcaggtgtctgagaagggcaaggcttacaccaactacttcggacggtgcaatgtggccgagcacgaaaagctgatcctgctggcccagctgaagcccgagaaggatagcgacgaagccgtgacatatagcctgggaaagtttgggcagagggccctggatttctacagcattcatgtgaccaaggagtccacccaccccgtgaagcccctggcccagatcgccggaaacagatacgcctccggacctgtgggaaaggccctgagcgacgcatgtatgggcacaatcgcctccttcctgtctaagtaccaggacatcatcatcgaacaccagaaggtggtgaagggcaaccagaagagactggagagcctgcgggagctggccggcaaggaaaacctggaataccctagcgtgaccctgccacctcagcctcacaccaaggagggcgttgatgcctacaacgaagtgatcgcccgggtgcgaatgtgggtgaacctgaacctgtggcagaagctgaagctaagcagagatgatgccaagcctctgctgagactgaagggattcccttcctttcctctggtcgagagacaggccaacgaagtggactggtgggacatggtgtgtaacgtgaagaagctgatcaacgagaaaaaggaggatggcaaggtgttttggcagaatctggctggctacaagagacaggaagccctgagaccatacctgagcagcgaggaagatcggaagaagggaaagaaattcgctcggtaccagctgggcgacctgctgctgcacctggaaaagaagcacggcgaggactggggaaaggtgtacgacgaggcctgggagcggattgacaagaaagtggaaggcctgagcaagcacatcaagctggaagaggaacggagaagcgaggacgcccagagcaaggccgccctgaccgactggctgcgggctaaggccagcttcgtgatcgagggcctgaaggaggccgacaaggacgagttctgcagatgcgagctgaagctgcagaagtggtacggggacctgcggggaaagcccttcgccatcgaagccgagaacagcatcctggacatcagcggcttcagcaagcagtacaactgtgccttcatctggcagaaggacggcgtgaagaagctgaacctgtacctgatcatcaactacttcaagggcggcaagctgcggttcaagaagatcaaacctgaagccttcgaagccaacagattctacaccgtgatcaacaaaaagagcggcgagatcgtgcccatggaggtgaacttcaacttcgacgaccccaacctgatcatcctgcctctggcctttggcaagagacagggcagagaattcatctggaacgacctgctgtccctggaaaccggcagcctgaagctggccaacggaagagtgatcgagaagacactgtacaacagaagaacccggcaggatgagcctgccctgttcgtggccctgaccttcgagcggcgggaggtcctggactcctccaatatcaaaccaatgaacctgatcggcgtggcaagaggcgaaaacatccccgccgtgatcgccctgaccgaccccgagggctgcccactgagccggtttaaggatagcctgggaaacccaacccacatcctgagaatcggcgagagctataaggagaagcagcggaccatccaggccaagaaggaggtggagcagcggagagccggcggctacagccggaagtacgccagcaaagccaagaatctggcagacgatatggtgagaaacaccgctagagatctgctgtactacgccgtgacccaggatgccatgctgatcttcgccaacctgagccggggcttcggccggcagggcaagcggaccttcatggccgagagacagtacacacggatggaggactggctgaccgccaagctggcctacgagggcctgagcaagacctacctgtccaagacactggcccagtacacctccaagacatgcagcaactgtgggtttaccatcaccagcgccgactacgacagggtgctggagaagctgaagaagacagcaacaggctggatgaccacaattaacggcaaggagctgaaggtggagggccagattacctactacaacagatacaagagacagaacgtagtcaaggacctgtccgtcgagctggatagactgagcgaagaatctgtgaacaacgacatctcctcctggacaaagggcagaagcggagaagctctgagcctcctgaagaaaagattctcccatagacccgtgcaggagaagttcgtgtgcctgaactgcggcttcgagacacacgcagccgagcaagccgccctgaacatcgccagatcctggctgttcctgcggagccaggagtacaagaaataccagacaaacaagacaaccggcaacaccgataagagagccttcgtcgagacctggcagtccttttaccggaagaagcttaaggaggtgtggaaacctgccgtgcggtctggcggatctggcggaggctcctctaaagcccctatcacattcggcgacctggccatctacttcagccaggaggaatgggagtggctgagccccatccagaaggacctgtacgaggacgtgatgctggaaaactacagaaatctggtgtccctgggcctcagctttagacgccccaacgtgatcaccctgctggaaaagggcaaggccccatggatggtcgagcctgctagacggcggagaggacctgatagcggcagcaaggtgggcggcccaagcagcggcgcccctcctcccagcggcggcagcccagccggctccccaacctctaccgaggagggcacctctgagtccgccacccccgagagcggccctggcacctccaccgagcccagcgagggcagcgcacccggcagccctgccggcagccccacctccacagaggagggaaccagcaccgagcccagcgaaggcagcgccccaggcaccagcaccgagcctagtgagcaggagattaaacggatcaacaagatcagaagaagacttgtgaaagacagcaacaccaagaaggccggcaagacaggccccatgaaaaccctgctggttagagtgatgacacccgatctgagagagcggctggaaaacctgagaaagaagcctgaaaatatcccccagcccatcagcaatacatctagagccaacctgaataagctgctgaccgattacaccgaaatgaagaaggcgatcctgcatgtgtactgggaagagttccagaaggaccctgtgggcctgatgagccgggtggcccagcctgccagcaagaagatcgatcagaacaagctgaaacctgagatggacgagaagggcaacctgaccaccgccggctttgcctgctctcagtgtggccagcccctgttcgtgtacaagctggagcaggtgtctgagaagggcaaggcttacaccaactacttcggacggtgcaatgtggccgagcacgaaaagctgatcctgctggcccagctgaagcccgagaaggatagcgacgaagccgtgacatatagcctgggaaagtttgggcagagggccctggatttctacagcattcatgtgaccaaggagtccacccaccccgtgaagcccctggcccagatcgccggaaacagatacgcctccggacctgtgggaaaggccctgagcgacgcatgtatgggcacaatcgcctccttcctgtctaagtaccaggacatcatcatcgaacaccagaaggtggtgaagggcaaccagaagagactggagagcctgcgggagctggccggcaaggaaaacctggaataccctagcgtgaccctgccacctcagcctcacaccaaggagggcgttgatgcctacaacgaagtgatcgcccgggtgcgaatgtgggtgaacctgaacctgtggcagaagctgaagctaagcagagatgatgccaagcctctgctgagactgaagggattcccttcctttcctctggtcgagagacaggccaacgaagtggactggtgggacatggtgtgtaacgtgaagaagctgatcaacgagaaaaaggaggatggcaaggtgttttggcagaatctggctggctacaagagacaggaagccctgagaccatacctgagcagcgaggaagatcggaagaagggaaagaaattcgctcggtaccagctgggcgacctgctgctgcacctggaaaagaagcacggcgaggactggggaaaggtgtacgacgaggcctgggagcggattgacaagaaagtggaaggcctgagcaagcacatcaagctggaagaggaacggagaagcgaggacgcccagagcaaggccgccctgaccgactggctgcgggctaaggccagcttcgtgatcgagggcctgaaggaggccgacaaggacgagttctgcagatgcgagctgaagctgcagaagtggtacggggacctgcggggaaagcccttcgccatcgaagccgagaacagcatcctggacatcagcggcttcagcaagcagtacaactgtgccttcatctggcagaaggacggcgtgaagaagctgaacctgtacctgatcatcaactacttcaagggcggcaagctgcggttcaagaagatcaaacctgaagccttcgaagccaacagattctacaccgtgatcaacaaaaagagcggcgagatcgtgcccatggaggtgaacttcaacttcgacgaccccaacctgatcatcctgcctctggcctttggcaagagacagggcagagaattcatctggaacgacctgctgtccctggaaaccggcagcctgaagctggccaacggaagagtgatcgagaagacactgtacaacagaagaacccggcaggatgagcctgccctgttcgtggccctgaccttcgagcggcgggaggtcctggactcctccaatatcaaaccaatgaacctgatcggcgtggcaagaggcgaaaacatccccgccgtgatcgccctgaccgaccccgagggctgcccactgagccggtttaaggatagcctgggaaacccaacccacatcctgagaatcggcgagagctataaggagaagcagcggaccatccaggccaagaaggaggtggagcagcggagagccggcggctacagccggaagtacgccagcaaagccaagaatctggcagacgatatggtgagaaacaccgctagagatctgctgtactacgccgtgacccaggatgccatgctgatcttcgccaacctgagccggggcttcggccggcagggcaagcggaccttcatggccgagagacagtacacacggatggaggactggctgaccgccaagctggcctacgagggcctgagcaagacctacctgtccaagacactggcccagtacacctccaagacatgcagcaactgtgggtttaccatcaccagcgccgactacgacagggtgctggagaagctgaagaagacagcaacaggctggatgaccacaattaacggcaaggagctgaaggtggagggccagattacctactacaacagatacaagagacagaacgtagtcaaggacctgtccgtcgagctggatagactgagcgaagaatctgtgaacaacgacatctcctcctggacaaagggcagaagcggagaagctctgagcctcctgaagaaaagattctcccatagacccgtgcaggagaagttcgtgtgcctgaactgcggcttcgagacacacgcagccgagcaagccgccctgaacatcgccagatcctggctgttcctgcggagccaggagtacaagaaataccagacaaacaagacaaccggcaacaccgataagagagccttcgtcgagacctggcagtccttttaccggaagaagcttaaggaggtgtggaaacctgccgtgcggtctggcggatctggcggaggctcctcaggacgtggtgacattcaaggacgtcgccatctacttcagccctgaggaatgggtgcggctgagcgccggacagagagaactgtaccaggaggtgatgctggacaactacgagctggtgaccagcctggatagagagagcaaactgctgtataagatggaccccgaggaagaaagctgcgagggcgtgccatacagctctgccgacagcggcgcccctgatagctcctccacctctgcttgtggatctggctccggcagcggccccaagaaaaagagaaaagtctaagctgccttctgcggggcttgccttctggccatgcccttcttctctcccttgcacctgtacctcttggtctttgaataaagcctgagtaggaaggctagcaaaaaaaaaaaaaaaaaaaaaaaaaaaaaaaaaaaaaaaaaaaaaaaaaaaaaaaaaaaaaaaaaaaaaaaaaaaaaaaa

SEQ ID NO: 18542 - RNA, 9512 nt, synthetic construct
  source 1..9512: mol_type = other RNA
aggaaataagagagaaaagaagagtaagaagaaatataagagccaccatggcccctaagaagaagcgtaaagtgagccggatggaacgcctcgtctacgaggtgcggcagaagtgcagaaacatcgaggacatctgcatctcctgcggatctctgaacgtgaccctggagcacccactgttcatcggcggcatgtgccagaactgtaaaaactgttttctggagtgtgcctatcaatacgacgatgacggctaccagagctactgcaccatctgttgcggcggaagagaggtgctgatgtgtggaaataacaactgctgccggtgcttctgcgtggaatgcgtggacctgctggtgggccccggcgccgcccaggccgctattaaggaagatccttggaactgctacatgtgcggccacaagggcacatacggcctgctgagacggagagaggactggcctagcagactgcagatgttcttcgccaataaccacgaccaggagttcgacccccctaaggtgtaccctcccgtccccgccgagaagagaaagcccatccgggtcctgagcctgttcgatggcatcgccaccggtctgctggtgctgaaggacctgggcatccaggtggataggtacattgcctccgaggtgtgcgaggactccatcaccgtgggaatggtgcgtcatcagggcaagatcatgtacgtgggcgacgtgcggagcgtgacacagaagcatatccaggagtggggccctttcgacctggtgatcggcggcagcccttgcaatgacctgagcatcgtgaacccagcccggaagggcctgtacgagggaaccggcagactgttcttcgagttttacagactgctgcacgacgcccggcctaaggaaggcgacgaccggcccttcttttggctgttcgagaatgtggtggccatgggagtcagcgacaagcgggatattagccggttcctggagagcaaccccgtgatgatcgatgccaaggaagtgagcgccgcccaccgggccagatacttctggggcaatctgcctggcatgaacagacccctggccagcaccgtgaacgacaagctggagctgcaggagtgcctggagcacggccggatcgccaagttcagcaaggtgagaaccatcaccacccgaagcaacagcatcaaacaaggcaaggaccagcactttcctgtgttcatgaacgagaaggaggacatcctgtggtgtaccgagatggagagagtgttcgggttcccagtccactacacagatgtcagcaacatgtctagactggccagacagagactgctgggaagaagctggtccgtccctgtgatcagacacctgttcgcccctctgaaggagtacttcgcctgcgtgagcagcggcaacagcaacgccaacagccggggccccagcttctctagcggcctggtgccactgtccctgagagggagccacatgggccccatggagatctacaaaaccgtgagcgcctggaagcggcagcctgtgcgcgtgctgagcctgtttcggaatatcgataaagtcctgaaaagcctgggattcctggagagcggctctggctccggcggtggcaccctgaagtacgtggaggatgtgacaaacgtggtcagacgggatgtggagaagtggggccccttcgatctggtgtacggcagcacccaacccctgggcagctcttgtgaccggtgccctggctggtacatgtttcagttccaccggatcctgcagtacgccctgccgagacaggagtcccagcggccattcttttggattttcatggacaacttgctgctgaccgaggatgaccaggaaactaccactcggttcctgcagaccgaagccgtgaccctgcaggacgtgagaggccgggactaccagaacgccatgcgggtgtggtccaacatccctggactgaaaagcaagcacgcacctctgacccctaaagaagaggagtacctgcaggcccaggtgcggagcagaagcaagctggacgcccctaaggtggatctgctggtgaagaattgcctcctgcccctgagagagtacttcaagtatttcagccagaatagtctgcccctgggaggcagcggcggcggcgccctggtgacatttgaggacgtcgccgtgcggttcacccaggaggaatgggctctgctggatccttctcagaaaatcctgtaccgggacgtgatgagagagacataccggaatctgacctccgtgggcatcaactgggaatgttgggaccttgaagcctgcttcagaagcctgggaagaaacctgagagtgcaggtggtgaagagaaagtgcgagctgaccaacagcggcccctgcgccgagggcggcccaagcagcggcgcccctcctcccagcggcggcagcccagccggctccccaacctctaccgaggagggcacctctgagtccgccacccccgagagcggccctggcacctccaccgagcccagcgagggcagcgcacccggcagccctgccggcagccccacctccacagaggagggaaccagcaccgagcccagcgaaggcagcgccccaggcaccagcaccgagcctagtgagcaggagattaaacggatcaacaagatcagaagaagacttgtgaaagacagcaacaccaagaaggccggcaagacaggccccatgaaaaccctgctggttagagtgatgacacccgatctgagagagcggctggaaaacctgagaaagaagcctgaaaatatcccccagcccatcagcaatacatctagagccaacctgaataagctgctgaccgattacaccgaaatgaagaaggcgatcctgcatgtgtactgggaagagttccagaaggaccctgtgggcctgatgagccgggtggcccagcctgccagcaagaagatcgatcagaacaagctgaaacctgagatggacgagaagggcaacctgaccaccgccggctttgcctgctctcagtgtggccagcccctgttcgtgtacaagctggagcaggtgtctgagaagggcaaggcttacaccaactacttcggacggtgcaatgtggccgagcacgaaaagctgatcctgctggcccagctgaagcccgagaaggatagcgacgaagccgtgacatatagcctgggaaagtttgggcagagggccctggatttctacagcattcatgtgaccaaggagtccacccaccccgtgaagcccctggcccagatcgccggaaacagatacgcctccggacctgtgggaaaggccctgagcgacgcatgtatgggcacaatcgcctccttcctgtctaagtaccaggacatcatcatcgaacaccagaaggtggtgaagggcaaccagaagagactggagagcctgcgggagctggccggcaaggaaaacctggaataccctagcgtgaccctgccacctcagcctcacaccaaggagggcgttgatgcctacaacgaagtgatcgcccgggtgcgaatgtgggtgaacctgaacctgtggcagaagctgaagctaagcagagatgatgccaagcctctgctgagactgaagggattcccttcctttcctctggtcgagagacaggccaacgaagtggactggtgggacatggtgtgtaacgtgaagaagctgatcaacgagaaaaaggaggatggcaaggtgttttggcagaatctggctggctacaagagacaggaagccctgagaccatacctgagcagcgaggaagatcggaagaagggaaagaaattcgctcggtaccagctgggcgacctgctgctgcacctggaaaagaagcacggcgaggactggggaaaggtgtacgacgaggcctgggagcggattgacaagaaagtggaaggcctgagcaagcacatcaagctggaagaggaacggagaagcgaggacgcccagagcaaggccgccctgaccgactggctgcgggctaaggccagcttcgtgatcgagggcctgaaggaggccgacaaggacgagttctgcagatgcgagctgaagctgcagaagtggtacggggacctgcggggaaagcccttcgccatcgaagccgagaacagcatcctggacatcagcggcttcagcaagcagtacaactgtgccttcatctggcagaaggacggcgtgaagaagctgaacctgtacctgatcatcaactacttcaagggcggcaagctgcggttcaagaagatcaaacctgaagccttcgaagccaacagattctacaccgtgatcaacaaaaagagcggcgagatcgtgcccatggaggtgaacttcaacttcgacgaccccaacctgatcatcctgcctctggcctttggcaagagacagggcagagaattcatctggaacgacctgctgtccctggaaaccggcagcctgaagctggccaacggaagagtgatcgagaagacactgtacaacagaagaacccggcaggatgagcctgccctgttcgtggccctgaccttcgagcggcgggaggtcctggactcctccaatatcaaaccaatgaacctgatcggcgtggcaagaggcgaaaacatccccgccgtgatcgccctgaccgaccccgagggctgcccactgagccggtttaaggatagcctgggaaacccaacccacatcctgagaatcggcgagagctataaggagaagcagcggaccatccaggccaagaaggaggtggagcagcggagagccggcggctacagccggaagtacgccagcaaagccaagaatctggcagacgatatggtgagaaacaccgctagagatctgctgtactacgccgtgacccaggatgccatgctgatcttcgccaacctgagccggggcttcggccggcagggcaagcggaccttcatggccgagagacagtacacacggatggaggactggctgaccgccaagctggcctacgagggcctgagcaagacctacctgtccaagacactggcccagtacacctccaagacatgcagcaactgtgggtttaccatcaccagcgccgactacgacagggtgctggagaagctgaagaagacagcaacaggctggatgaccacaattaacggcaaggagctgaaggtggagggccagattacctactacaacagatacaagagacagaacgtagtcaaggacctgtccgtcgagctggatagactgagcgaagaatctgtgaacaacgacatctcctcctggacaaagggcagaagcggagaagctctgagcctcctgaagaaaagattctcccatagacccgtgcaggagaagttcgtgtgcctgaactgcggcttcgagacacacgcagccgagcaagccgccctgaacatcgccagatcctggctgttcctgcggagccaggagtacaagaaataccagacaaacaagacaaccggcaacaccgataagagagccttcgtcgagacctggcagtccttttaccggaagaagcttaaggaggtgtggaaacctgccgtgcggtctggcggatctggcggaggctcctctaaagcccctatcacattcggcgacctggccatctacttcagccaggaggaatgggagtggctgagccccatccagaaggacctgtacgaggacgtgatgctggaaaactacagaaatctggtgtccctgggcctcagctttagacgccccaacgtgatcaccctgctggaaaagggcaaggccccatggatggtcgagcctgctagacggcggagaggacctgatagcggcagcaaggtgggcggcccaagcagcggcgcccctcctcccagcggcggcagcccagccggctccccaacctctaccgaggagggcacctctgagtccgccacccccgagagcggccctggcacctccaccgagcccagcgagggcagcgcacccggcagccctgccggcagccccacctccacagaggagggaaccagcaccgagcccagcgaaggcagcgccccaggcaccagcaccgagcctagtgagcaggagattaaacggatcaacaagatcagaagaagacttgtgaaagacagcaacaccaagaaggccggcaagacaggccccatgaaaaccctgctggttagagtgatgacacccgatctgagagagcggctggaaaacctgagaaagaagcctgaaaatatcccccagcccatcagcaatacatctagagccaacctgaataagctgctgaccgattacaccgaaatgaagaaggcgatcctgcatgtgtactgggaagagttccagaaggaccctgtgggcctgatgagccgggtggcccagcctgccagcaagaagatcgatcagaacaagctgaaacctgagatggacgagaagggcaacctgaccaccgccggctttgcctgctctcagtgtggccagcccctgttcgtgtacaagctggagcaggtgtctgagaagggcaaggcttacaccaactacttcggacggtgcaatgtggccgagcacgaaaagctgatcctgctggcccagctgaagcccgagaaggatagcgacgaagccgtgacatatagcctgggaaagtttgggcagagggccctggatttctacagcattcatgtgaccaaggagtccacccaccccgtgaagcccctggcccagatcgccggaaacagatacgcctccggacctgtgggaaaggccctgagcgacgcatgtatgggcacaatcgcctccttcctgtctaagtaccaggacatcatcatcgaacaccagaaggtggtgaagggcaaccagaagagactggagagcctgcgggagctggccggcaaggaaaacctggaataccctagcgtgaccctgccacctcagcctcacaccaaggagggcgttgatgcctacaacgaagtgatcgcccgggtgcgaatgtgggtgaacctgaacctgtggcagaagctgaagctaagcagagatgatgccaagcctctgctgagactgaagggattcccttcctttcctctggtcgagagacaggccaacgaagtggactggtgggacatggtgtgtaacgtgaagaagctgatcaacgagaaaaaggaggatggcaaggtgttttggcagaatctggctggctacaagagacaggaagccctgagaccatacctgagcagcgaggaagatcggaagaagggaaagaaattcgctcggtaccagctgggcgacctgctgctgcacctggaaaagaagcacggcgaggactggggaaaggtgtacgacgaggcctgggagcggattgacaagaaagtggaaggcctgagcaagcacatcaagctggaagaggaacggagaagcgaggacgcccagagcaaggccgccctgaccgactggctgcgggctaaggccagcttcgtgatcgagggcctgaaggaggccgacaaggacgagttctgcagatgcgagctgaagctgcagaagtggtacggggacctgcggggaaagcccttcgccatcgaagccgagaacagcatcctggacatcagcggcttcagcaagcagtacaactgtgccttcatctggcagaaggacggcgtgaagaagctgaacctgtacctgatcatcaactacttcaagggcggcaagctgcggttcaagaagatcaaacctgaagccttcgaagccaacagattctacaccgtgatcaacaaaaagagcggcgagatcgtgcccatggaggtgaacttcaacttcgacgaccccaacctgatcatcctgcctctggcctttggcaagagacagggcagagaattcatctggaacgacctgctgtccctggaaaccggcagcctgaagctggccaacggaagagtgatcgagaagacactgtacaacagaagaacccggcaggatgagcctgccctgttcgtggccctgaccttcgagcggcgggaggtcctggactcctccaatatcaaaccaatgaacctgatcggcgtggcaagaggcgaaaacatccccgccgtgatcgccctgaccgaccccgagggctgcccactgagccggtttaaggatagcctgggaaacccaacccacatcctgagaatcggcgagagctataaggagaagcagcggaccatccaggccaagaaggaggtggagcagcggagagccggcggctacagccggaagtacgccagcaaagccaagaatctggcagacgatatggtgagaaacaccgctagagatctgctgtactacgccgtgacccaggatgccatgctgatcttcgccaacctgagccggggcttcggccggcagggcaagcggaccttcatggccgagagacagtacacacggatggaggactggctgaccgccaagctggcctacgagggcctgagcaagacctacctgtccaagacactggcccagtacacctccaagacatgcagcaactgtgggtttaccatcaccagcgccgactacgacagggtgctggagaagctgaagaagacagcaacaggctggatgaccacaattaacggcaaggagctgaaggtggagggccagattacctactacaacagatacaagagacagaacgtagtcaaggacctgtccgtcgagctggatagactgagcgaagaatctgtgaacaacgacatctcctcctggacaaagggcagaagcggagaagctctgagcctcctgaagaaaagattctcccatagacccgtgcaggagaagttcgtgtgcctgaactgcggcttcgagacacacgcagccgagcaagccgccctgaacatcgccagatcctggctgttcctgcggagccaggagtacaagaaataccagacaaacaagacaaccggcaacaccgataagagagccttcgtcgagacctggcagtccttttaccggaagaagcttaaggaggtgtggaaacctgccgtgcggtctggcggatctggcggaggctcctgtcgccttccgggacgtgatcgtggacttcacccaggaggaatggcagcagctgaagcctgctcaaaaggacctgtacagagatgtgatgatggaaatctactggaatctggtgtctctggacctggaaaccgagggagatatgaacgagcctgaccccgagaaagacagctgggaggatagaacaagcatcgtggttgtggaaggcctgatgcggaacggcgcccagggctacgcctgcgagaaggccggcatccagggctgtagagtgggatctggctccggcagcggccccaagaaaaagagaaaagtctaagctgccttctgcggggcttgccttctggccatgcccttcttctctcccttgcacctgtacctcttggtctttgaataaagcctgagtaggaaggctagcaaaaaaaaaaaaaaaaaaaaaaaaaaaaaaaaaaaaaaaaaaaaaaaaaaaaaaaaaaaaaaaaaaaaaaaaaaaaaaaa

SEQ ID NO: 18543 - RNA, 9494 nt, synthetic construct
  source 1..9494: mol_type = other RNA
aggaaataagagagaaaagaagagtaagaagaaatataagagccaccatggcccctaagaagaagcgtaaagtgagccggatggaacgcctcgtctacgaggtgcggcagaagtgcagaaacatcgaggacatctgcatctcctgcggatctctgaacgtgaccctggagcacccactgttcatcggcggcatgtgccagaactgtaaaaactgttttctggagtgtgcctatcaatacgacgatgacggctaccagagctactgcaccatctgttgcggcggaagagaggtgctgatgtgtggaaataacaactgctgccggtgcttctgcgtggaatgcgtggacctgctggtgggccccggcgccgcccaggccgctattaaggaagatccttggaactgctacatgtgcggccacaagggcacatacggcctgctgagacggagagaggactggcctagcagactgcagatgttcttcgccaataaccacgaccaggagttcgacccccctaaggtgtaccctcccgtccccgccgagaagagaaagcccatccgggtcctgagcctgttcgatggcatcgccaccggtctgctggtgctgaaggacctgggcatccaggtggataggtacattgcctccgaggtgtgcgaggactccatcaccgtgggaatggtgcgtcatcagggcaagatcatgtacgtgggcgacgtgcggagcgtgacacagaagcatatccaggagtggggccctttcgacctggtgatcggcggcagcccttgcaatgacctgagcatcgtgaacccagcccggaagggcctgtacgagggaaccggcagactgttcttcgagttttacagactgctgcacgacgcccggcctaaggaaggcgacgaccggcccttcttttggctgttcgagaatgtggtggccatgggagtcagcgacaagcgggatattagccggttcctggagagcaaccccgtgatgatcgatgccaaggaagtgagcgccgcccaccgggccagatacttctggggcaatctgcctggcatgaacagacccctggccagcaccgtgaacgacaagctggagctgcaggagtgcctggagcacggccggatcgccaagttcagcaaggtgagaaccatcaccacccgaagcaacagcatcaaacaaggcaaggaccagcactttcctgtgttcatgaacgagaaggaggacatcctgtggtgtaccgagatggagagagtgttcgggttcccagtccactacacagatgtcagcaacatgtctagactggccagacagagactgctgggaagaagctggtccgtccctgtgatcagacacctgttcgcccctctgaaggagtacttcgcctgcgtgagcagcggcaacagcaacgccaacagccggggccccagcttctctagcggcctggtgccactgtccctgagagggagccacatgggccccatggagatctacaaaaccgtgagcgcctggaagcggcagcctgtgcgcgtgctgagcctgtttcggaatatcgataaagtcctgaaaagcctgggattcctggagagcggctctggctccggcggtggcaccctgaagtacgtggaggatgtgacaaacgtggtcagacgggatgtggagaagtggggccccttcgatctggtgtacggcagcacccaacccctgggcagctcttgtgaccggtgccctggctggtacatgtttcagttccaccggatcctgcagtacgccctgccgagacaggagtcccagcggccattcttttggattttcatggacaacttgctgctgaccgaggatgaccaggaaactaccactcggttcctgcagaccgaagccgtgaccctgcaggacgtgagaggccgggactaccagaacgccatgcgggtgtggtccaacatccctggactgaaaagcaagcacgcacctctgacccctaaagaagaggagtacctgcaggcccaggtgcggagcagaagcaagctggacgcccctaaggtggatctgctggtgaagaattgcctcctgcccctgagagagtacttcaagtatttcagccagaatagtctgcccctgggaggcagcggcggcggcgccctggtgacatttgaggacgtcgccgtgcggttcacccaggaggaatgggctctgctggatccttctcagaaaatcctgtaccgggacgtgatgagagagacataccggaatctgacctccgtgggcatcaactgggaatgttgggaccttgaagcctgcttcagaagcctgggaagaaacctgagagtgcaggtggtgaagagaaagtgcgagctgaccaacagcggcccctgcgccgagggcggcccaagcagcggcgcccctcctcccagcggcggcagcccagccggctccccaacctctaccgaggagggcacctctgagtccgccacccccgagagcggccctggcacctccaccgagcccagcgagggcagcgcacccggcagccctgccggcagccccacctccacagaggagggaaccagcaccgagcccagcgaaggcagcgccccaggcaccagcaccgagcctagtgagcaggagattaaacggatcaacaagatcagaagaagacttgtgaaagacagcaacaccaagaaggccggcaagacaggccccatgaaaaccctgctggttagagtgatgacacccgatctgagagagcggctggaaaacctgagaaagaagcctgaaaatatcccccagcccatcagcaatacatctagagccaacctgaataagctgctgaccgattacaccgaaatgaagaaggcgatcctgcatgtgtactgggaagagttccagaaggaccctgtgggcctgatgagccgggtggcccagcctgccagcaagaagatcgatcagaacaagctgaaacctgagatggacgagaagggcaacctgaccaccgccggctttgcctgctctcagtgtggccagcccctgttcgtgtacaagctggagcaggtgtctgagaagggcaaggcttacaccaactacttcggacggtgcaatgtggccgagcacgaaaagctgatcctgctggcccagctgaagcccgagaaggatagcgacgaagccgtgacatatagcctgggaaagtttgggcagagggccctggatttctacagcattcatgtgaccaaggagtccacccaccccgtgaagcccctggcccagatcgccggaaacagatacgcctccggacctgtgggaaaggccctgagcgacgcatgtatgggcacaatcgcctccttcctgtctaagtaccaggacatcatcatcgaacaccagaaggtggtgaagggcaaccagaagagactggagagcctgcgggagctggccggcaaggaaaacctggaataccctagcgtgaccctgccacctcagcctcacaccaaggagggcgttgatgcctacaacgaagtgatcgcccgggtgcgaatgtgggtgaacctgaacctgtggcagaagctgaagctaagcagagatgatgccaagcctctgctgagactgaagggattcccttcctttcctctggtcgagagacaggccaacgaagtggactggtgggacatggtgtgtaacgtgaagaagctgatcaacgagaaaaaggaggatggcaaggtgttttggcagaatctggctggctacaagagacaggaagccctgagaccatacctgagcagcgaggaagatcggaagaagggaaagaaattcgctcggtaccagctgggcgacctgctgctgcacctggaaaagaagcacggcgaggactggggaaaggtgtacgacgaggcctgggagcggattgacaagaaagtggaaggcctgagcaagcacatcaagctggaagaggaacggagaagcgaggacgcccagagcaaggccgccctgaccgactggctgcgggctaaggccagcttcgtgatcgagggcctgaaggaggccgacaaggacgagttctgcagatgcgagctgaagctgcagaagtggtacggggacctgcggggaaagcccttcgccatcgaagccgagaacagcatcctggacatcagcggcttcagcaagcagtacaactgtgccttcatctggcagaaggacggcgtgaagaagctgaacctgtacctgatcatcaactacttcaagggcggcaagctgcggttcaagaagatcaaacctgaagccttcgaagccaacagattctacaccgtgatcaacaaaaagagcggcgagatcgtgcccatggaggtgaacttcaacttcgacgaccccaacctgatcatcctgcctctggcctttggcaagagacagggcagagaattcatctggaacgacctgctgtccctggaaaccggcagcctgaagctggccaacggaagagtgatcgagaagacactgtacaacagaagaacccggcaggatgagcctgccctgttcgtggccctgaccttcgagcggcgggaggtcctggactcctccaatatcaaaccaatgaacctgatcggcgtggcaagaggcgaaaacatccccgccgtgatcgccctgaccgaccccgagggctgcccactgagccggtttaaggatagcctgggaaacccaacccacatcctgagaatcggcgagagctataaggagaagcagcggaccatccaggccaagaaggaggtggagcagcggagagccggcggctacagccggaagtacgccagcaaagccaagaatctggcagacgatatggtgagaaacaccgctagagatctgctgtactacgccgtgacccaggatgccatgctgatcttcgccaacctgagccggggcttcggccggcagggcaagcggaccttcatggccgagagacagtacacacggatggaggactggctgaccgccaagctggcctacgagggcctgagcaagacctacctgtccaagacactggcccagtacacctccaagacatgcagcaactgtgggtttaccatcaccagcgccgactacgacagggtgctggagaagctgaagaagacagcaacaggctggatgaccacaattaacggcaaggagctgaaggtggagggccagattacctactacaacagatacaagagacagaacgtagtcaaggacctgtccgtcgagctggatagactgagcgaagaatctgtgaacaacgacatctcctcctggacaaagggcagaagcggagaagctctgagcctcctgaagaaaagattctcccatagacccgtgcaggagaagttcgtgtgcctgaactgcggcttcgagacacacgcagccgagcaagccgccctgaacatcgccagatcctggctgttcctgcggagccaggagtacaagaaataccagacaaacaagacaaccggcaacaccgataagagagccttcgtcgagacctggcagtccttttaccggaagaagcttaaggaggtgtggaaacctgccgtgcggtctggcggatctggcggaggctcctctaaagcccctatcacattcggcgacctggccatctacttcagccaggaggaatgggagtggctgagccccatccagaaggacctgtacgaggacgtgatgctggaaaactacagaaatctggtgtccctgggcctcagctttagacgccccaacgtgatcaccctgctggaaaagggcaaggccccatggatggtcgagcctgctagacggcggagaggacctgatagcggcagcaaggtgggcggcccaagcagcggcgcccctcctcccagcggcggcagcccagccggctccccaacctctaccgaggagggcacctctgagtccgccacccccgagagcggccctggcacctccaccgagcccagcgagggcagcgcacccggcagccctgccggcagccccacctccacagaggagggaaccagcaccgagcccagcgaaggcagcgccccaggcaccagcaccgagcctagtgagcaggagattaaacggatcaacaagatcagaagaagacttgtgaaagacagcaacaccaagaaggccggcaagacaggccccatgaaaaccctgctggttagagtgatgacacccgatctgagagagcggctggaaaacctgagaaagaagcctgaaaatatcccccagcccatcagcaatacatctagagccaacctgaataagctgctgaccgattacaccgaaatgaagaaggcgatcctgcatgtgtactgggaagagttccagaaggaccctgtgggcctgatgagccgggtggcccagcctgccagcaagaagatcgatcagaacaagctgaaacctgagatggacgagaagggcaacctgaccaccgccggctttgcctgctctcagtgtggccagcccctgttcgtgtacaagctggagcaggtgtctgagaagggcaaggcttacaccaactacttcggacggtgcaatgtggccgagcacgaaaagctgatcctgctggcccagctgaagcccgagaaggatagcgacgaagccgtgacatatagcctgggaaagtttgggcagagggccctggatttctacagcattcatgtgaccaaggagtccacccaccccgtgaagcccctggcccagatcgccggaaacagatacgcctccggacctgtgggaaaggccctgagcgacgcatgtatgggcacaatcgcctccttcctgtctaagtaccaggacatcatcatcgaacaccagaaggtggtgaagggcaaccagaagagactggagagcctgcgggagctggccggcaaggaaaacctggaataccctagcgtgaccctgccacctcagcctcacaccaaggagggcgttgatgcctacaacgaagtgatcgcccgggtgcgaatgtgggtgaacctgaacctgtggcagaagctgaagctaagcagagatgatgccaagcctctgctgagactgaagggattcccttcctttcctctggtcgagagacaggccaacgaagtggactggtgggacatggtgtgtaacgtgaagaagctgatcaacgagaaaaaggaggatggcaaggtgttttggcagaatctggctggctacaagagacaggaagccctgagaccatacctgagcagcgaggaagatcggaagaagggaaagaaattcgctcggtaccagctgggcgacctgctgctgcacctggaaaagaagcacggcgaggactggggaaaggtgtacgacgaggcctgggagcggattgacaagaaagtggaaggcctgagcaagcacatcaagctggaagaggaacggagaagcgaggacgcccagagcaaggccgccctgaccgactggctgcgggctaaggccagcttcgtgatcgagggcctgaaggaggccgacaaggacgagttctgcagatgcgagctgaagctgcagaagtggtacggggacctgcggggaaagcccttcgccatcgaagccgagaacagcatcctggacatcagcggcttcagcaagcagtacaactgtgccttcatctggcagaaggacggcgtgaagaagctgaacctgtacctgatcatcaactacttcaagggcggcaagctgcggttcaagaagatcaaacctgaagccttcgaagccaacagattctacaccgtgatcaacaaaaagagcggcgagatcgtgcccatggaggtgaacttcaacttcgacgaccccaacctgatcatcctgcctctggcctttggcaagagacagggcagagaattcatctggaacgacctgctgtccctggaaaccggcagcctgaagctggccaacggaagagtgatcgagaagacactgtacaacagaagaacccggcaggatgagcctgccctgttcgtggccctgaccttcgagcggcgggaggtcctggactcctccaatatcaaaccaatgaacctgatcggcgtggcaagaggcgaaaacatccccgccgtgatcgccctgaccgaccccgagggctgcccactgagccggtttaaggatagcctgggaaacccaacccacatcctgagaatcggcgagagctataaggagaagcagcggaccatccaggccaagaaggaggtggagcagcggagagccggcggctacagccggaagtacgccagcaaagccaagaatctggcagacgatatggtgagaaacaccgctagagatctgctgtactacgccgtgacccaggatgccatgctgatcttcgccaacctgagccggggcttcggccggcagggcaagcggaccttcatggccgagagacagtacacacggatggaggactggctgaccgccaagctggcctacgagggcctgagcaagacctacctgtccaagacactggcccagtacacctccaagacatgcagcaactgtgggtttaccatcaccagcgccgactacgacagggtgctggagaagctgaagaagacagcaacaggctggatgaccacaattaacggcaaggagctgaaggtggagggccagattacctactacaacagatacaagagacagaacgtagtcaaggacctgtccgtcgagctggatagactgagcgaagaatctgtgaacaacgacatctcctcctggacaaagggcagaagcggagaagctctgagcctcctgaagaaaagattctcccatagacccgtgcaggagaagttcgtgtgcctgaactgcggcttcgagacacacgcagccgagcaagccgccctgaacatcgccagatcctggctgttcctgcggagccaggagtacaagaaataccagacaaacaagacaaccggcaacaccgataagagagccttcgtcgagacctggcagtccttttaccggaagaagcttaaggaggtgtggaaacctgccgtgcggtctggcggatctggcggaggctcctgtgacctacaacgacgtgcacgtggacatcacccaggaggaatgggctctgatggaccccagccagcggaacctgtacaaggatgtgatggtcgagacatacatgaacctgaccgccatcggatataattgggagaacctggaagtggaagaaccatgtcagaaccccctgaagcacggcagacacgagagacctcatacaggcgagaaaccttacgagtacaatcagtgcggcaaggccttcgcccaacctggatctggctccggcagcggccccaagaaaaagagaaaagtctaagctgccttctgcggggcttgccttctggccatgcccttcttctctcccttgcacctgtacctcttggtctttgaataaagcctgagtaggaaggctagcaaaaaaaaaaaaaaaaaaaaaaaaaaaaaaaaaaaaaaaaaaaaaaaaaaaaaaaaaaaaaaaaaaaaaaaaaaaaaaaa

SEQ ID NO: 18544 - RNA, 9485 nt, synthetic construct
  source 1..9485: mol_type = other RNA
aggaaataagagagaaaagaagagtaagaagaaatataagagccaccatggcccctaagaagaagcgtaaagtgagccggatggaacgcctcgtctacgaggtgcggcagaagtgcagaaacatcgaggacatctgcatctcctgcggatctctgaacgtgaccctggagcacccactgttcatcggcggcatgtgccagaactgtaaaaactgttttctggagtgtgcctatcaatacgacgatgacggctaccagagctactgcaccatctgttgcggcggaagagaggtgctgatgtgtggaaataacaactgctgccggtgcttctgcgtggaatgcgtggacctgctggtgggccccggcgccgcccaggccgctattaaggaagatccttggaactgctacatgtgcggccacaagggcacatacggcctgctgagacggagagaggactggcctagcagactgcagatgttcttcgccaataaccacgaccaggagttcgacccccctaaggtgtaccctcccgtccccgccgagaagagaaagcccatccgggtcctgagcctgttcgatggcatcgccaccggtctgctggtgctgaaggacctgggcatccaggtggataggtacattgcctccgaggtgtgcgaggactccatcaccgtgggaatggtgcgtcatcagggcaagatcatgtacgtgggcgacgtgcggagcgtgacacagaagcatatccaggagtggggccctttcgacctggtgatcggcggcagcccttgcaatgacctgagcatcgtgaacccagcccggaagggcctgtacgagggaaccggcagactgttcttcgagttttacagactgctgcacgacgcccggcctaaggaaggcgacgaccggcccttcttttggctgttcgagaatgtggtggccatgggagtcagcgacaagcgggatattagccggttcctggagagcaaccccgtgatgatcgatgccaaggaagtgagcgccgcccaccgggccagatacttctggggcaatctgcctggcatgaacagacccctggccagcaccgtgaacgacaagctggagctgcaggagtgcctggagcacggccggatcgccaagttcagcaaggtgagaaccatcaccacccgaagcaacagcatcaaacaaggcaaggaccagcactttcctgtgttcatgaacgagaaggaggacatcctgtggtgtaccgagatggagagagtgttcgggttcccagtccactacacagatgtcagcaacatgtctagactggccagacagagactgctgggaagaagctggtccgtccctgtgatcagacacctgttcgcccctctgaaggagtacttcgcctgcgtgagcagcggcaacagcaacgccaacagccggggccccagcttctctagcggcctggtgccactgtccctgagagggagccacatgggccccatggagatctacaaaaccgtgagcgcctggaagcggcagcctgtgcgcgtgctgagcctgtttcggaatatcgataaagtcctgaaaagcctgggattcctggagagcggctctggctccggcggtggcaccctgaagtacgtggaggatgtgacaaacgtggtcagacgggatgtggagaagtggggccccttcgatctggtgtacggcagcacccaacccctgggcagctcttgtgaccggtgccctggctggtacatgtttcagttccaccggatcctgcagtacgccctgccgagacaggagtcccagcggccattcttttggattttcatggacaacttgctgctgaccgaggatgaccaggaaactaccactcggttcctgcagaccgaagccgtgaccctgcaggacgtgagaggccgggactaccagaacgccatgcgggtgtggtccaacatccctggactgaaaagcaagcacgcacctctgacccctaaagaagaggagtacctgcaggcccaggtgcggagcagaagcaagctggacgcccctaaggtggatctgctggtgaagaattgcctcctgcccctgagagagtacttcaagtatttcagccagaatagtctgcccctgggaggcagcggcggcggcgccctggtgacatttgaggacgtcgccgtgcggttcacccaggaggaatgggctctgctggatccttctcagaaaatcctgtaccgggacgtgatgagagagacataccggaatctgacctccgtgggcatcaactgggaatgttgggaccttgaagcctgcttcagaagcctgggaagaaacctgagagtgcaggtggtgaagagaaagtgcgagctgaccaacagcggcccctgcgccgagggcggcccaagcagcggcgcccctcctcccagcggcggcagcccagccggctccccaacctctaccgaggagggcacctctgagtccgccacccccgagagcggccctggcacctccaccgagcccagcgagggcagcgcacccggcagccctgccggcagccccacctccacagaggagggaaccagcaccgagcccagcgaaggcagcgccccaggcaccagcaccgagcctagtgagcaggagattaaacggatcaacaagatcagaagaagacttgtgaaagacagcaacaccaagaaggccggcaagacaggccccatgaaaaccctgctggttagagtgatgacacccgatctgagagagcggctggaaaacctgagaaagaagcctgaaaatatcccccagcccatcagcaatacatctagagccaacctgaataagctgctgaccgattacaccgaaatgaagaaggcgatcctgcatgtgtactgggaagagttccagaaggaccctgtgggcctgatgagccgggtggcccagcctgccagcaagaagatcgatcagaacaagctgaaacctgagatggacgagaagggcaacctgaccaccgccggctttgcctgctctcagtgtggccagcccctgttcgtgtacaagctggagcaggtgtctgagaagggcaaggcttacaccaactacttcggacggtgcaatgtggccgagcacgaaaagctgatcctgctggcccagctgaagcccgagaaggatagcgacgaagccgtgacatatagcctgggaaagtttgggcagagggccctggatttctacagcattcatgtgaccaaggagtccacccaccccgtgaagcccctggcccagatcgccggaaacagatacgcctccggacctgtgggaaaggccctgagcgacgcatgtatgggcacaatcgcctccttcctgtctaagtaccaggacatcatcatcgaacaccagaaggtggtgaagggcaaccagaagagactggagagcctgcgggagctggccggcaaggaaaacctggaataccctagcgtgaccctgccacctcagcctcacaccaaggagggcgttgatgcctacaacgaagtgatcgcccgggtgcgaatgtgggtgaacctgaacctgtggcagaagctgaagctaagcagagatgatgccaagcctctgctgagactgaagggattcccttcctttcctctggtcgagagacaggccaacgaagtggactggtgggacatggtgtgtaacgtgaagaagctgatcaacgagaaaaaggaggatggcaaggtgttttggcagaatctggctggctacaagagacaggaagccctgagaccatacctgagcagcgaggaagatcggaagaagggaaagaaattcgctcggtaccagctgggcgacctgctgctgcacctggaaaagaagcacggcgaggactggggaaaggtgtacgacgaggcctgggagcggattgacaagaaagtggaaggcctgagcaagcacatcaagctggaagaggaacggagaagcgaggacgcccagagcaaggccgccctgaccgactggctgcgggctaaggccagcttcgtgatcgagggcctgaaggaggccgacaaggacgagttctgcagatgcgagctgaagctgcagaagtggtacggggacctgcggggaaagcccttcgccatcgaagccgagaacagcatcctggacatcagcggcttcagcaagcagtacaactgtgccttcatctggcagaaggacggcgtgaagaagctgaacctgtacctgatcatcaactacttcaagggcggcaagctgcggttcaagaagatcaaacctgaagccttcgaagccaacagattctacaccgtgatcaacaaaaagagcggcgagatcgtgcccatggaggtgaacttcaacttcgacgaccccaacctgatcatcctgcctctggcctttggcaagagacagggcagagaattcatctggaacgacctgctgtccctggaaaccggcagcctgaagctggccaacggaagagtgatcgagaagacactgtacaacagaagaacccggcaggatgagcctgccctgttcgtggccctgaccttcgagcggcgggaggtcctggactcctccaatatcaaaccaatgaacctgatcggcgtggcaagaggcgaaaacatccccgccgtgatcgccctgaccgaccccgagggctgcccactgagccggtttaaggatagcctgggaaacccaacccacatcctgagaatcggcgagagctataaggagaagcagcggaccatccaggccaagaaggaggtggagcagcggagagccggcggctacagccggaagtacgccagcaaagccaagaatctggcagacgatatggtgagaaacaccgctagagatctgctgtactacgccgtgacccaggatgccatgctgatcttcgccaacctgagccggggcttcggccggcagggcaagcggaccttcatggccgagagacagtacacacggatggaggactggctgaccgccaagctggcctacgagggcctgagcaagacctacctgtccaagacactggcccagtacacctccaagacatgcagcaactgtgggtttaccatcaccagcgccgactacgacagggtgctggagaagctgaagaagacagcaacaggctggatgaccacaattaacggcaaggagctgaaggtggagggccagattacctactacaacagatacaagagacagaacgtagtcaaggacctgtccgtcgagctggatagactgagcgaagaatctgtgaacaacgacatctcctcctggacaaagggcagaagcggagaagctctgagcctcctgaagaaaagattctcccatagacccgtgcaggagaagttcgtgtgcctgaactgcggcttcgagacacacgcagccgagcaagccgccctgaacatcgccagatcctggctgttcctgcggagccaggagtacaagaaataccagacaaacaagacaaccggcaacaccgataagagagccttcgtcgagacctggcagtccttttaccggaagaagcttaaggaggtgtggaaacctgccgtgcggtctggcggatctggcggaggctcctctaaagcccctatcacattcggcgacctggccatctacttcagccaggaggaatgggagtggctgagccccatccagaaggacctgtacgaggacgtgatgctggaaaactacagaaatctggtgtccctgggcctcagctttagacgccccaacgtgatcaccctgctggaaaagggcaaggccccatggatggtcgagcctgctagacggcggagaggacctgatagcggcagcaaggtgggcggcccaagcagcggcgcccctcctcccagcggcggcagcccagccggctccccaacctctaccgaggagggcacctctgagtccgccacccccgagagcggccctggcacctccaccgagcccagcgagggcagcgcacccggcagccctgccggcagccccacctccacagaggagggaaccagcaccgagcccagcgaaggcagcgccccaggcaccagcaccgagcctagtgagcaggagattaaacggatcaacaagatcagaagaagacttgtgaaagacagcaacaccaagaaggccggcaagacaggccccatgaaaaccctgctggttagagtgatgacacccgatctgagagagcggctggaaaacctgagaaagaagcctgaaaatatcccccagcccatcagcaatacatctagagccaacctgaataagctgctgaccgattacaccgaaatgaagaaggcgatcctgcatgtgtactgggaagagttccagaaggaccctgtgggcctgatgagccgggtggcccagcctgccagcaagaagatcgatcagaacaagctgaaacctgagatggacgagaagggcaacctgaccaccgccggctttgcctgctctcagtgtggccagcccctgttcgtgtacaagctggagcaggtgtctgagaagggcaaggcttacaccaactacttcggacggtgcaatgtggccgagcacgaaaagctgatcctgctggcccagctgaagcccgagaaggatagcgacgaagccgtgacatatagcctgggaaagtttgggcagagggccctggatttctacagcattcatgtgaccaaggagtccacccaccccgtgaagcccctggcccagatcgccggaaacagatacgcctccggacctgtgggaaaggccctgagcgacgcatgtatgggcacaatcgcctccttcctgtctaagtaccaggacatcatcatcgaacaccagaaggtggtgaagggcaaccagaagagactggagagcctgcgggagctggccggcaaggaaaacctggaataccctagcgtgaccctgccacctcagcctcacaccaaggagggcgttgatgcctacaacgaagtgatcgcccgggtgcgaatgtgggtgaacctgaacctgtggcagaagctgaagctaagcagagatgatgccaagcctctgctgagactgaagggattcccttcctttcctctggtcgagagacaggccaacgaagtggactggtgggacatggtgtgtaacgtgaagaagctgatcaacgagaaaaaggaggatggcaaggtgttttggcagaatctggctggctacaagagacaggaagccctgagaccatacctgagcagcgaggaagatcggaagaagggaaagaaattcgctcggtaccagctgggcgacctgctgctgcacctggaaaagaagcacggcgaggactggggaaaggtgtacgacgaggcctgggagcggattgacaagaaagtggaaggcctgagcaagcacatcaagctggaagaggaacggagaagcgaggacgcccagagcaaggccgccctgaccgactggctgcgggctaaggccagcttcgtgatcgagggcctgaaggaggccgacaaggacgagttctgcagatgcgagctgaagctgcagaagtggtacggggacctgcggggaaagcccttcgccatcgaagccgagaacagcatcctggacatcagcggcttcagcaagcagtacaactgtgccttcatctggcagaaggacggcgtgaagaagctgaacctgtacctgatcatcaactacttcaagggcggcaagctgcggttcaagaagatcaaacctgaagccttcgaagccaacagattctacaccgtgatcaacaaaaagagcggcgagatcgtgcccatggaggtgaacttcaacttcgacgaccccaacctgatcatcctgcctctggcctttggcaagagacagggcagagaattcatctggaacgacctgctgtccctggaaaccggcagcctgaagctggccaacggaagagtgatcgagaagacactgtacaacagaagaacccggcaggatgagcctgccctgttcgtggccctgaccttcgagcggcgggaggtcctggactcctccaatatcaaaccaatgaacctgatcggcgtggcaagaggcgaaaacatccccgccgtgatcgccctgaccgaccccgagggctgcccactgagccggtttaaggatagcctgggaaacccaacccacatcctgagaatcggcgagagctataaggagaagcagcggaccatccaggccaagaaggaggtggagcagcggagagccggcggctacagccggaagtacgccagcaaagccaagaatctggcagacgatatggtgagaaacaccgctagagatctgctgtactacgccgtgacccaggatgccatgctgatcttcgccaacctgagccggggcttcggccggcagggcaagcggaccttcatggccgagagacagtacacacggatggaggactggctgaccgccaagctggcctacgagggcctgagcaagacctacctgtccaagacactggcccagtacacctccaagacatgcagcaactgtgggtttaccatcaccagcgccgactacgacagggtgctggagaagctgaagaagacagcaacaggctggatgaccacaattaacggcaaggagctgaaggtggagggccagattacctactacaacagatacaagagacagaacgtagtcaaggacctgtccgtcgagctggatagactgagcgaagaatctgtgaacaacgacatctcctcctggacaaagggcagaagcggagaagctctgagcctcctgaagaaaagattctcccatagacccgtgcaggagaagttcgtgtgcctgaactgcggcttcgagacacacgcagccgagcaagccgccctgaacatcgccagatcctggctgttcctgcggagccaggagtacaagaaataccagacaaacaagacaaccggcaacaccgataagagagccttcgtcgagacctggcagtccttttaccggaagaagcttaaggaggtgtggaaacctgccgtgcggtctggcggatctggcggaggctccttctcaggagagcgtggccttcgaggacgtggccgtctacttcaccaccaaagagtgggccatcatggtgcccgccgagagagccctgtacagagatgtgatgctggaaaactacgaggccgtggcttttgtggccgtgcctcctacaagcaagcccgctctggtgtcccacctggaacagggcaaggaaagctgcttcatccggcctccaggcgtgctgagcagaagcgactggcgggccggaggatctggctccggcagcggccccaagaaaaagagaaaagtctaagctgccttctgcggggcttgccttctggccatgcccttcttctctcccttgcacctgtacctcttggtctttgaataaagcctgagtaggaaggctagcaaaaaaaaaaaaaaaaaaaaaaaaaaaaaaaaaaaaaaaaaaaaaaaaaaaaaaaaaaaaaaaaaaaaaaaaaaaaaaaa

SEQ ID NO: 18545 - RNA, 9485 nt, synthetic construct
  source 1..9485: mol_type = other RNA
aggaaataagagagaaaagaagagtaagaagaaatataagagccaccatggcccctaagaagaagcgtaaagtgagccggatggaacgcctcgtctacgaggtgcggcagaagtgcagaaacatcgaggacatctgcatctcctgcggatctctgaacgtgaccctggagcacccactgttcatcggcggcatgtgccagaactgtaaaaactgttttctggagtgtgcctatcaatacgacgatgacggctaccagagctactgcaccatctgttgcggcggaagagaggtgctgatgtgtggaaataacaactgctgccggtgcttctgcgtggaatgcgtggacctgctggtgggccccggcgccgcccaggccgctattaaggaagatccttggaactgctacatgtgcggccacaagggcacatacggcctgctgagacggagagaggactggcctagcagactgcagatgttcttcgccaataaccacgaccaggagttcgacccccctaaggtgtaccctcccgtccccgccgagaagagaaagcccatccgggtcctgagcctgttcgatggcatcgccaccggtctgctggtgctgaaggacctgggcatccaggtggataggtacattgcctccgaggtgtgcgaggactccatcaccgtgggaatggtgcgtcatcagggcaagatcatgtacgtgggcgacgtgcggagcgtgacacagaagcatatccaggagtggggccctttcgacctggtgatcggcggcagcccttgcaatgacctgagcatcgtgaacccagcccggaagggcctgtacgagggaaccggcagactgttcttcgagttttacagactgctgcacgacgcccggcctaaggaaggcgacgaccggcccttcttttggctgttcgagaatgtggtggccatgggagtcagcgacaagcgggatattagccggttcctggagagcaaccccgtgatgatcgatgccaaggaagtgagcgccgcccaccgggccagatacttctggggcaatctgcctggcatgaacagacccctggccagcaccgtgaacgacaagctggagctgcaggagtgcctggagcacggccggatcgccaagttcagcaaggtgagaaccatcaccacccgaagcaacagcatcaaacaaggcaaggaccagcactttcctgtgttcatgaacgagaaggaggacatcctgtggtgtaccgagatggagagagtgttcgggttcccagtccactacacagatgtcagcaacatgtctagactggccagacagagactgctgggaagaagctggtccgtccctgtgatcagacacctgttcgcccctctgaaggagtacttcgcctgcgtgagcagcggcaacagcaacgccaacagccggggccccagcttctctagcggcctggtgccactgtccctgagagggagccacatgggccccatggagatctacaaaaccgtgagcgcctggaagcggcagcctgtgcgcgtgctgagcctgtttcggaatatcgataaagtcctgaaaagcctgggattcctggagagcggctctggctccggcggtggcaccctgaagtacgtggaggatgtgacaaacgtggtcagacgggatgtggagaagtggggccccttcgatctggtgtacggcagcacccaacccctgggcagctcttgtgaccggtgccctggctggtacatgtttcagttccaccggatcctgcagtacgccctgccgagacaggagtcccagcggccattcttttggattttcatggacaacttgctgctgaccgaggatgaccaggaaactaccactcggttcctgcagaccgaagccgtgaccctgcaggacgtgagaggccgggactaccagaacgccatgcgggtgtggtccaacatccctggactgaaaagcaagcacgcacctctgacccctaaagaagaggagtacctgcaggcccaggtgcggagcagaagcaagctggacgcccctaaggtggatctgctggtgaagaattgcctcctgcccctgagagagtacttcaagtatttcagccagaatagtctgcccctgggaggcagcggcggcggcgccctggtgacatttgaggacgtcgccgtgcggttcacccaggaggaatgggctctgctggatccttctcagaaaatcctgtaccgggacgtgatgagagagacataccggaatctgacctccgtgggcatcaactgggaatgttgggaccttgaagcctgcttcagaagcctgggaagaaacctgagagtgcaggtggtgaagagaaagtgcgagctgaccaacagcggcccctgcgccgagggcggcccaagcagcggcgcccctcctcccagcggcggcagcccagccggctccccaacctctaccgaggagggcacctctgagtccgccacccccgagagcggccctggcacctccaccgagcccagcgagggcagcgcacccggcagccctgccggcagccccacctccacagaggagggaaccagcaccgagcccagcgaaggcagcgccccaggcaccagcaccgagcctagtgagcaggagattaaacggatcaacaagatcagaagaagacttgtgaaagacagcaacaccaagaaggccggcaagacaggccccatgaaaaccctgctggttagagtgatgacacccgatctgagagagcggctggaaaacctgagaaagaagcctgaaaatatcccccagcccatcagcaatacatctagagccaacctgaataagctgctgaccgattacaccgaaatgaagaaggcgatcctgcatgtgtactgggaagagttccagaaggaccctgtgggcctgatgagccgggtggcccagcctgccagcaagaagatcgatcagaacaagctgaaacctgagatggacgagaagggcaacctgaccaccgccggctttgcctgctctcagtgtggccagcccctgttcgtgtacaagctggagcaggtgtctgagaagggcaaggcttacaccaactacttcggacggtgcaatgtggccgagcacgaaaagctgatcctgctggcccagctgaagcccgagaaggatagcgacgaagccgtgacatatagcctgggaaagtttgggcagagggccctggatttctacagcattcatgtgaccaaggagtccacccaccccgtgaagcccctggcccagatcgccggaaacagatacgcctccggacctgtgggaaaggccctgagcgacgcatgtatgggcacaatcgcctccttcctgtctaagtaccaggacatcatcatcgaacaccagaaggtggtgaagggcaaccagaagagactggagagcctgcgggagctggccggcaaggaaaacctggaataccctagcgtgaccctgccacctcagcctcacaccaaggagggcgttgatgcctacaacgaagtgatcgcccgggtgcgaatgtgggtgaacctgaacctgtggcagaagctgaagctaagcagagatgatgccaagcctctgctgagactgaagggattcccttcctttcctctggtcgagagacaggccaacgaagtggactggtgggacatggtgtgtaacgtgaagaagctgatcaacgagaaaaaggaggatggcaaggtgttttggcagaatctggctggctacaagagacaggaagccctgagaccatacctgagcagcgaggaagatcggaagaagggaaagaaattcgctcggtaccagctgggcgacctgctgctgcacctggaaaagaagcacggcgaggactggggaaaggtgtacgacgaggcctgggagcggattgacaagaaagtggaaggcctgagcaagcacatcaagctggaagaggaacggagaagcgaggacgcccagagcaaggccgccctgaccgactggctgcgggctaaggccagcttcgtgatcgagggcctgaaggaggccgacaaggacgagttctgcagatgcgagctgaagctgcagaagtggtacggggacctgcggggaaagcccttcgccatcgaagccgagaacagcatcctggacatcagcggcttcagcaagcagtacaactgtgccttcatctggcagaaggacggcgtgaagaagctgaacctgtacctgatcatcaactacttcaagggcggcaagctgcggttcaagaagatcaaacctgaagccttcgaagccaacagattctacaccgtgatcaacaaaaagagcggcgagatcgtgcccatggaggtgaacttcaacttcgacgaccccaacctgatcatcctgcctctggcctttggcaagagacagggcagagaattcatctggaacgacctgctgtccctggaaaccggcagcctgaagctggccaacggaagagtgatcgagaagacactgtacaacagaagaacccggcaggatgagcctgccctgttcgtggccctgaccttcgagcggcgggaggtcctggactcctccaatatcaaaccaatgaacctgatcggcgtggcaagaggcgaaaacatccccgccgtgatcgccctgaccgaccccgagggctgcccactgagccggtttaaggatagcctgggaaacccaacccacatcctgagaatcggcgagagctataaggagaagcagcggaccatccaggccaagaaggaggtggagcagcggagagccggcggctacagccggaagtacgccagcaaagccaagaatctggcagacgatatggtgagaaacaccgctagagatctgctgtactacgccgtgacccaggatgccatgctgatcttcgccaacctgagccggggcttcggccggcagggcaagcggaccttcatggccgagagacagtacacacggatggaggactggctgaccgccaagctggcctacgagggcctgagcaagacctacctgtccaagacactggcccagtacacctccaagacatgcagcaactgtgggtttaccatcaccagcgccgactacgacagggtgctggagaagctgaagaagacagcaacaggctggatgaccacaattaacggcaaggagctgaaggtggagggccagattacctactacaacagatacaagagacagaacgtagtcaaggacctgtccgtcgagctggatagactgagcgaagaatctgtgaacaacgacatctcctcctggacaaagggcagaagcggagaagctctgagcctcctgaagaaaagattctcccatagacccgtgcaggagaagttcgtgtgcctgaactgcggcttcgagacacacgcagccgagcaagccgccctgaacatcgccagatcctggctgttcctgcggagccaggagtacaagaaataccagacaaacaagacaaccggcaacaccgataagagagccttcgtcgagacctggcagtccttttaccggaagaagcttaaggaggtgtggaaacctgccgtgcggtctggcggatctggcggaggctcctctaaagcccctatcacattcggcgacctggccatctacttcagccaggaggaatgggagtggctgagccccatccagaaggacctgtacgaggacgtgatgctggaaaactacagaaatctggtgtccctgggcctcagctttagacgccccaacgtgatcaccctgctggaaaagggcaaggccccatggatggtcgagcctgctagacggcggagaggacctgatagcggcagcaaggtgggcggcccaagcagcggcgcccctcctcccagcggcggcagcccagccggctccccaacctctaccgaggagggcacctctgagtccgccacccccgagagcggccctggcacctccaccgagcccagcgagggcagcgcacccggcagccctgccggcagccccacctccacagaggagggaaccagcaccgagcccagcgaaggcagcgccccaggcaccagcaccgagcctagtgagcaggagattaaacggatcaacaagatcagaagaagacttgtgaaagacagcaacaccaagaaggccggcaagacaggccccatgaaaaccctgctggttagagtgatgacacccgatctgagagagcggctggaaaacctgagaaagaagcctgaaaatatcccccagcccatcagcaatacatctagagccaacctgaataagctgctgaccgattacaccgaaatgaagaaggcgatcctgcatgtgtactgggaagagttccagaaggaccctgtgggcctgatgagccgggtggcccagcctgccagcaagaagatcgatcagaacaagctgaaacctgagatggacgagaagggcaacctgaccaccgccggctttgcctgctctcagtgtggccagcccctgttcgtgtacaagctggagcaggtgtctgagaagggcaaggcttacaccaactacttcggacggtgcaatgtggccgagcacgaaaagctgatcctgctggcccagctgaagcccgagaaggatagcgacgaagccgtgacatatagcctgggaaagtttgggcagagggccctggatttctacagcattcatgtgaccaaggagtccacccaccccgtgaagcccctggcccagatcgccggaaacagatacgcctccggacctgtgggaaaggccctgagcgacgcatgtatgggcacaatcgcctccttcctgtctaagtaccaggacatcatcatcgaacaccagaaggtggtgaagggcaaccagaagagactggagagcctgcgggagctggccggcaaggaaaacctggaataccctagcgtgaccctgccacctcagcctcacaccaaggagggcgttgatgcctacaacgaagtgatcgcccgggtgcgaatgtgggtgaacctgaacctgtggcagaagctgaagctaagcagagatgatgccaagcctctgctgagactgaagggattcccttcctttcctctggtcgagagacaggccaacgaagtggactggtgggacatggtgtgtaacgtgaagaagctgatcaacgagaaaaaggaggatggcaaggtgttttggcagaatctggctggctacaagagacaggaagccctgagaccatacctgagcagcgaggaagatcggaagaagggaaagaaattcgctcggtaccagctgggcgacctgctgctgcacctggaaaagaagcacggcgaggactggggaaaggtgtacgacgaggcctgggagcggattgacaagaaagtggaaggcctgagcaagcacatcaagctggaagaggaacggagaagcgaggacgcccagagcaaggccgccctgaccgactggctgcgggctaaggccagcttcgtgatcgagggcctgaaggaggccgacaaggacgagttctgcagatgcgagctgaagctgcagaagtggtacggggacctgcggggaaagcccttcgccatcgaagccgagaacagcatcctggacatcagcggcttcagcaagcagtacaactgtgccttcatctggcagaaggacggcgtgaagaagctgaacctgtacctgatcatcaactacttcaagggcggcaagctgcggttcaagaagatcaaacctgaagccttcgaagccaacagattctacaccgtgatcaacaaaaagagcggcgagatcgtgcccatggaggtgaacttcaacttcgacgaccccaacctgatcatcctgcctctggcctttggcaagagacagggcagagaattcatctggaacgacctgctgtccctggaaaccggcagcctgaagctggccaacggaagagtgatcgagaagacactgtacaacagaagaacccggcaggatgagcctgccctgttcgtggccctgaccttcgagcggcgggaggtcctggactcctccaatatcaaaccaatgaacctgatcggcgtggcaagaggcgaaaacatccccgccgtgatcgccctgaccgaccccgagggctgcccactgagccggtttaaggatagcctgggaaacccaacccacatcctgagaatcggcgagagctataaggagaagcagcggaccatccaggccaagaaggaggtggagcagcggagagccggcggctacagccggaagtacgccagcaaagccaagaatctggcagacgatatggtgagaaacaccgctagagatctgctgtactacgccgtgacccaggatgccatgctgatcttcgccaacctgagccggggcttcggccggcagggcaagcggaccttcatggccgagagacagtacacacggatggaggactggctgaccgccaagctggcctacgagggcctgagcaagacctacctgtccaagacactggcccagtacacctccaagacatgcagcaactgtgggtttaccatcaccagcgccgactacgacagggtgctggagaagctgaagaagacagcaacaggctggatgaccacaattaacggcaaggagctgaaggtggagggccagattacctactacaacagatacaagagacagaacgtagtcaaggacctgtccgtcgagctggatagactgagcgaagaatctgtgaacaacgacatctcctcctggacaaagggcagaagcggagaagctctgagcctcctgaagaaaagattctcccatagacccgtgcaggagaagttcgtgtgcctgaactgcggcttcgagacacacgcagccgagcaagccgccctgaacatcgccagatcctggctgttcctgcggagccaggagtacaagaaataccagacaaacaagacaaccggcaacaccgataagagagccttcgtcgagacctggcagtccttttaccggaagaagcttaaggaggtgtggaaacctgccgtgcggtctggcggatctggcggaggctccttctaaagcccctatcacattcggcgacctggccatctacttcagccaggaggaatgggagtggctgagccccatccagaaggacctgtacgaggacgtgatgctggaaaactacagaaatctggtgtccctgggcctcagctttagacgccccaacgtgatcaccctgctggaaaagggcaaggccccatggatggtcgagcctgctagacggcggagaggacctgatagcggcagcaaggtgggatctggctccggcagcggccccaagaaaaagagaaaagtctaagctgccttctgcggggcttgccttctggccatgcccttcttctctcccttgcacctgtacctcttggtctttgaataaagcctgagtaggaaggctagcaaaaaaaaaaaaaaaaaaaaaaaaaaaaaaaaaaaaaaaaaaaaaaaaaaaaaaaaaaaaaaaaaaaaaaaaaaaaaaaa

SEQ ID NO: 18546 - RNA, 9485 nt, synthetic construct
  source 1..9485: mol_type = other RNA
aggaaataagagagaaaagaagagtaagaagaaatataagagccaccatggcccctaagaagaagcgtaaagtgagccggatggaacgcctcgtctacgaggtgcggcagaagtgcagaaacatcgaggacatctgcatctcctgcggatctctgaacgtgaccctggagcacccactgttcatcggcggcatgtgccagaactgtaaaaactgttttctggagtgtgcctatcaatacgacgatgacggctaccagagctactgcaccatctgttgcggcggaagagaggtgctgatgtgtggaaataacaactgctgccggtgcttctgcgtggaatgcgtggacctgctggtgggccccggcgccgcccaggccgctattaaggaagatccttggaactgctacatgtgcggccacaagggcacatacggcctgctgagacggagagaggactggcctagcagactgcagatgttcttcgccaataaccacgaccaggagttcgacccccctaaggtgtaccctcccgtccccgccgagaagagaaagcccatccgggtcctgagcctgttcgatggcatcgccaccggtctgctggtgctgaaggacctgggcatccaggtggataggtacattgcctccgaggtgtgcgaggactccatcaccgtgggaatggtgcgtcatcagggcaagatcatgtacgtgggcgacgtgcggagcgtgacacagaagcatatccaggagtggggccctttcgacctggtgatcggcggcagcccttgcaatgacctgagcatcgtgaacccagcccggaagggcctgtacgagggaaccggcagactgttcttcgagttttacagactgctgcacgacgcccggcctaaggaaggcgacgaccggcccttcttttggctgttcgagaatgtggtggccatgggagtcagcgacaagcgggatattagccggttcctggagagcaaccccgtgatgatcgatgccaaggaagtgagcgccgcccaccgggccagatacttctggggcaatctgcctggcatgaacagacccctggccagcaccgtgaacgacaagctggagctgcaggagtgcctggagcacggccggatcgccaagttcagcaaggtgagaaccatcaccacccgaagcaacagcatcaaacaaggcaaggaccagcactttcctgtgttcatgaacgagaaggaggacatcctgtggtgtaccgagatggagagagtgttcgggttcccagtccactacacagatgtcagcaacatgtctagactggccagacagagactgctgggaagaagctggtccgtccctgtgatcagacacctgttcgcccctctgaaggagtacttcgcctgcgtgagcagcggcaacagcaacgccaacagccggggccccagcttctctagcggcctggtgccactgtccctgagagggagccacatgggccccatggagatctacaaaaccgtgagcgcctggaagcggcagcctgtgcgcgtgctgagcctgtttcggaatatcgataaagtcctgaaaagcctgggattcctggagagcggctctggctccggcggtggcaccctgaagtacgtggaggatgtgacaaacgtggtcagacgggatgtggagaagtggggccccttcgatctggtgtacggcagcacccaacccctgggcagctcttgtgaccggtgccctggctggtacatgtttcagttccaccggatcctgcagtacgccctgccgagacaggagtcccagcggccattcttttggattttcatggacaacttgctgctgaccgaggatgaccaggaaactaccactcggttcctgcagaccgaagccgtgaccctgcaggacgtgagaggccgggactaccagaacgccatgcgggtgtggtccaacatccctggactgaaaagcaagcacgcacctctgacccctaaagaagaggagtacctgcaggcccaggtgcggagcagaagcaagctggacgcccctaaggtggatctgctggtgaagaattgcctcctgcccctgagagagtacttcaagtatttcagccagaatagtctgcccctgggaggcagcggcggcggcgccctggtgacatttgaggacgtcgccgtgcggttcacccaggaggaatgggctctgctggatccttctcagaaaatcctgtaccgggacgtgatgagagagacataccggaatctgacctccgtgggcatcaactgggaatgttgggaccttgaagcctgcttcagaagcctgggaagaaacctgagagtgcaggtggtgaagagaaagtgcgagctgaccaacagcggcccctgcgccgagggcggcccaagcagcggcgcccctcctcccagcggcggcagcccagccggctccccaacctctaccgaggagggcacctctgagtccgccacccccgagagcggccctggcacctccaccgagcccagcgagggcagcgcacccggcagccctgccggcagccccacctccacagaggagggaaccagcaccgagcccagcgaaggcagcgccccaggcaccagcaccgagcctagtgagcaggagattaaacggatcaacaagatcagaagaagacttgtgaaagacagcaacaccaagaaggccggcaagacaggccccatgaaaaccctgctggttagagtgatgacacccgatctgagagagcggctggaaaacctgagaaagaagcctgaaaatatcccccagcccatcagcaatacatctagagccaacctgaataagctgctgaccgattacaccgaaatgaagaaggcgatcctgcatgtgtactgggaagagttccagaaggaccctgtgggcctgatgagccgggtggcccagcctgccagcaagaagatcgatcagaacaagctgaaacctgagatggacgagaagggcaacctgaccaccgccggctttgcctgctctcagtgtggccagcccctgttcgtgtacaagctggagcaggtgtctgagaagggcaaggcttacaccaactacttcggacggtgcaatgtggccgagcacgaaaagctgatcctgctggcccagctgaagcccgagaaggatagcgacgaagccgtgacatatagcctgggaaagtttgggcagagggccctggatttctacagcattcatgtgaccaaggagtccacccaccccgtgaagcccctggcccagatcgccggaaacagatacgcctccggacctgtgggaaaggccctgagcgacgcatgtatgggcacaatcgcctccttcctgtctaagtaccaggacatcatcatcgaacaccagaaggtggtgaagggcaaccagaagagactggagagcctgcgggagctggccggcaaggaaaacctggaataccctagcgtgaccctgccacctcagcctcacaccaaggagggcgttgatgcctacaacgaagtgatcgcccgggtgcgaatgtgggtgaacctgaacctgtggcagaagctgaagctaagcagagatgatgccaagcctctgctgagactgaagggattcccttcctttcctctggtcgagagacaggccaacgaagtggactggtgggacatggtgtgtaacgtgaagaagctgatcaacgagaaaaaggaggatggcaaggtgttttggcagaatctggctggctacaagagacaggaagccctgagaccatacctgagcagcgaggaagatcggaagaagggaaagaaattcgctcggtaccagctgggcgacctgctgctgcacctggaaaagaagcacggcgaggactggggaaaggtgtacgacgaggcctgggagcggattgacaagaaagtggaaggcctgagcaagcacatcaagctggaagaggaacggagaagcgaggacgcccagagcaaggccgccctgaccgactggctgcgggctaaggccagcttcgtgatcgagggcctgaaggaggccgacaaggacgagttctgcagatgcgagctgaagctgcagaagtggtacggggacctgcggggaaagcccttcgccatcgaagccgagaacagcatcctggacatcagcggcttcagcaagcagtacaactgtgccttcatctggcagaaggacggcgtgaagaagctgaacctgtacctgatcatcaactacttcaagggcggcaagctgcggttcaagaagatcaaacctgaagccttcgaagccaacagattctacaccgtgatcaacaaaaagagcggcgagatcgtgcccatggaggtgaacttcaacttcgacgaccccaacctgatcatcctgcctctggcctttggcaagagacagggcagagaattcatctggaacgacctgctgtccctggaaaccggcagcctgaagctggccaacggaagagtgatcgagaagacactgtacaacagaagaacccggcaggatgagcctgccctgttcgtggccctgaccttcgagcggcgggaggtcctggactcctccaatatcaaaccaatgaacctgatcggcgtggcaagaggcgaaaacatccccgccgtgatcgccctgaccgaccccgagggctgcccactgagccggtttaaggatagcctgggaaacccaacccacatcctgagaatcggcgagagctataaggagaagcagcggaccatccaggccaagaaggaggtggagcagcggagagccggcggctacagccggaagtacgccagcaaagccaagaatctggcagacgatatggtgagaaacaccgctagagatctgctgtactacgccgtgacccaggatgccatgctgatcttcgccaacctgagccggggcttcggccggcagggcaagcggaccttcatggccgagagacagtacacacggatggaggactggctgaccgccaagctggcctacgagggcctgagcaagacctacctgtccaagacactggcccagtacacctccaagacatgcagcaactgtgggtttaccatcaccagcgccgactacgacagggtgctggagaagctgaagaagacagcaacaggctggatgaccacaattaacggcaaggagctgaaggtggagggccagattacctactacaacagatacaagagacagaacgtagtcaaggacctgtccgtcgagctggatagactgagcgaagaatctgtgaacaacgacatctcctcctggacaaagggcagaagcggagaagctctgagcctcctgaagaaaagattctcccatagacccgtgcaggagaagttcgtgtgcctgaactgcggcttcgagacacacgcagccgagcaagccgccctgaacatcgccagatcctggctgttcctgcggagccaggagtacaagaaataccagacaaacaagacaaccggcaacaccgataagagagccttcgtcgagacctggcagtccttttaccggaagaagcttaaggaggtgtggaaacctgccgtgcggtctggcggatctggcggaggctcctctaaagcccctatcacattcggcgacctggccatctacttcagccaggaggaatgggagtggctgagccccatccagaaggacctgtacgaggacgtgatgctggaaaactacagaaatctggtgtccctgggcctcagctttagacgccccaacgtgatcaccctgctggaaaagggcaaggccccatggatggtcgagcctgctagacggcggagaggacctgatagcggcagcaaggtgggcggcccaagcagcggcgcccctcctcccagcggcggcagcccagccggctccccaacctctaccgaggagggcacctctgagtccgccacccccgagagcggccctggcacctccaccgagcccagcgagggcagcgcacccggcagccctgccggcagccccacctccacagaggagggaaccagcaccgagcccagcgaaggcagcgccccaggcaccagcaccgagcctagtgagcaggagattaaacggatcaacaagatcagaagaagacttgtgaaagacagcaacaccaagaaggccggcaagacaggccccatgaaaaccctgctggttagagtgatgacacccgatctgagagagcggctggaaaacctgagaaagaagcctgaaaatatcccccagcccatcagcaatacatctagagccaacctgaataagctgctgaccgattacaccgaaatgaagaaggcgatcctgcatgtgtactgggaagagttccagaaggaccctgtgggcctgatgagccgggtggcccagcctgccagcaagaagatcgatcagaacaagctgaaacctgagatggacgagaagggcaacctgaccaccgccggctttgcctgctctcagtgtggccagcccctgttcgtgtacaagctggagcaggtgtctgagaagggcaaggcttacaccaactacttcggacggtgcaatgtggccgagcacgaaaagctgatcctgctggcccagctgaagcccgagaaggatagcgacgaagccgtgacatatagcctgggaaagtttgggcagagggccctggatttctacagcattcatgtgaccaaggagtccacccaccccgtgaagcccctggcccagatcgccggaaacagatacgcctccggacctgtgggaaaggccctgagcgacgcatgtatgggcacaatcgcctccttcctgtctaagtaccaggacatcatcatcgaacaccagaaggtggtgaagggcaaccagaagagactggagagcctgcgggagctggccggcaaggaaaacctggaataccctagcgtgaccctgccacctcagcctcacaccaaggagggcgttgatgcctacaacgaagtgatcgcccgggtgcgaatgtgggtgaacctgaacctgtggcagaagctgaagctaagcagagatgatgccaagcctctgctgagactgaagggattcccttcctttcctctggtcgagagacaggccaacgaagtggactggtgggacatggtgtgtaacgtgaagaagctgatcaacgagaaaaaggaggatggcaaggtgttttggcagaatctggctggctacaagagacaggaagccctgagaccatacctgagcagcgaggaagatcggaagaagggaaagaaattcgctcggtaccagctgggcgacctgctgctgcacctggaaaagaagcacggcgaggactggggaaaggtgtacgacgaggcctgggagcggattgacaagaaagtggaaggcctgagcaagcacatcaagctggaagaggaacggagaagcgaggacgcccagagcaaggccgccctgaccgactggctgcgggctaaggccagcttcgtgatcgagggcctgaaggaggccgacaaggacgagttctgcagatgcgagctgaagctgcagaagtggtacggggacctgcggggaaagcccttcgccatcgaagccgagaacagcatcctggacatcagcggcttcagcaagcagtacaactgtgccttcatctggcagaaggacggcgtgaagaagctgaacctgtacctgatcatcaactacttcaagggcggcaagctgcggttcaagaagatcaaacctgaagccttcgaagccaacagattctacaccgtgatcaacaaaaagagcggcgagatcgtgcccatggaggtgaacttcaacttcgacgaccccaacctgatcatcctgcctctggcctttggcaagagacagggcagagaattcatctggaacgacctgctgtccctggaaaccggcagcctgaagctggccaacggaagagtgatcgagaagacactgtacaacagaagaacccggcaggatgagcctgccctgttcgtggccctgaccttcgagcggcgggaggtcctggactcctccaatatcaaaccaatgaacctgatcggcgtggcaagaggcgaaaacatccccgccgtgatcgccctgaccgaccccgagggctgcccactgagccggtttaaggatagcctgggaaacccaacccacatcctgagaatcggcgagagctataaggagaagcagcggaccatccaggccaagaaggaggtggagcagcggagagccggcggctacagccggaagtacgccagcaaagccaagaatctggcagacgatatggtgagaaacaccgctagagatctgctgtactacgccgtgacccaggatgccatgctgatcttcgccaacctgagccggggcttcggccggcagggcaagcggaccttcatggccgagagacagtacacacggatggaggactggctgaccgccaagctggcctacgagggcctgagcaagacctacctgtccaagacactggcccagtacacctccaagacatgcagcaactgtgggtttaccatcaccagcgccgactacgacagggtgctggagaagctgaagaagacagcaacaggctggatgaccacaattaacggcaaggagctgaaggtggagggccagattacctactacaacagatacaagagacagaacgtagtcaaggacctgtccgtcgagctggatagactgagcgaagaatctgtgaacaacgacatctcctcctggacaaagggcagaagcggagaagctctgagcctcctgaagaaaagattctcccatagacccgtgcaggagaagttcgtgtgcctgaactgcggcttcgagacacacgcagccgagcaagccgccctgaacatcgccagatcctggctgttcctgcggagccaggagtacaagaaataccagacaaacaagacaaccggcaacaccgataagagagccttcgtcgagacctggcagtccttttaccggaagaagcttaaggaggtgtggaaacctgccgtgcggtctggcggatctggcggaggctcctgagatgggcctgctgacattcagagacatcgctatcgagttcagcctggaggaatggcaatgtctggactgcgcccagagaaatctgtacagagatgtgatgctggaaaactaccggaacctggtgtctctgggcatcgccgtgtccaagcccgacctgatcacctgcctcgagcagaacaaggaaagccagaacatcaagcggaacaaaatggtcgccaagcaccctgtgatgcacagccacggatctggctccggcagcggccccaagaaaaagagaaaagtctaagctgccttctgcggggcttgccttctggccatgcccttcttctctcccttgcacctgtacctcttggtctttgaataaagcctgagtaggaaggctagcaaaaaaaaaaaaaaaaaaaaaaaaaaaaaaaaaaaaaaaaaaaaaaaaaaaaaaaaaaaaaaaaaaaaaaaaaaaaaaaa

SEQ ID NO: 18547 - RNA, 9485 nt, synthetic construct
  source 1..9485: mol_type = other RNA
aggaaataagagagaaaagaagagtaagaagaaatataagagccaccatggcccctaagaagaagcgtaaagtgagccggatggaacgcctcgtctacgaggtgcggcagaagtgcagaaacatcgaggacatctgcatctcctgcggatctctgaacgtgaccctggagcacccactgttcatcggcggcatgtgccagaactgtaaaaactgttttctggagtgtgcctatcaatacgacgatgacggctaccagagctactgcaccatctgttgcggcggaagagaggtgctgatgtgtggaaataacaactgctgccggtgcttctgcgtggaatgcgtggacctgctggtgggccccggcgccgcccaggccgctattaaggaagatccttggaactgctacatgtgcggccacaagggcacatacggcctgctgagacggagagaggactggcctagcagactgcagatgttcttcgccaataaccacgaccaggagttcgacccccctaaggtgtaccctcccgtccccgccgagaagagaaagcccatccgggtcctgagcctgttcgatggcatcgccaccggtctgctggtgctgaaggacctgggcatccaggtggataggtacattgcctccgaggtgtgcgaggactccatcaccgtgggaatggtgcgtcatcagggcaagatcatgtacgtgggcgacgtgcggagcgtgacacagaagcatatccaggagtggggccctttcgacctggtgatcggcggcagcccttgcaatgacctgagcatcgtgaacccagcccggaagggcctgtacgagggaaccggcagactgttcttcgagttttacagactgctgcacgacgcccggcctaaggaaggcgacgaccggcccttcttttggctgttcgagaatgtggtggccatgggagtcagcgacaagcgggatattagccggttcctggagagcaaccccgtgatgatcgatgccaaggaagtgagcgccgcccaccgggccagatacttctggggcaatctgcctggcatgaacagacccctggccagcaccgtgaacgacaagctggagctgcaggagtgcctggagcacggccggatcgccaagttcagcaaggtgagaaccatcaccacccgaagcaacagcatcaaacaaggcaaggaccagcactttcctgtgttcatgaacgagaaggaggacatcctgtggtgtaccgagatggagagagtgttcgggttcccagtccactacacagatgtcagcaacatgtctagactggccagacagagactgctgggaagaagctggtccgtccctgtgatcagacacctgttcgcccctctgaaggagtacttcgcctgcgtgagcagcggcaacagcaacgccaacagccggggccccagcttctctagcggcctggtgccactgtccctgagagggagccacatgggccccatggagatctacaaaaccgtgagcgcctggaagcggcagcctgtgcgcgtgctgagcctgtttcggaatatcgataaagtcctgaaaagcctgggattcctggagagcggctctggctccggcggtggcaccctgaagtacgtggaggatgtgacaaacgtggtcagacgggatgtggagaagtggggccccttcgatctggtgtacggcagcacccaacccctgggcagctcttgtgaccggtgccctggctggtacatgtttcagttccaccggatcctgcagtacgccctgccgagacaggagtcccagcggccattcttttggattttcatggacaacttgctgctgaccgaggatgaccaggaaactaccactcggttcctgcagaccgaagccgtgaccctgcaggacgtgagaggccgggactaccagaacgccatgcgggtgtggtccaacatccctggactgaaaagcaagcacgcacctctgacccctaaagaagaggagtacctgcaggcccaggtgcggagcagaagcaagctggacgcccctaaggtggatctgctggtgaagaattgcctcctgcccctgagagagtacttcaagtatttcagccagaatagtctgcccctgggaggcagcggcggcggcgccctggtgacatttgaggacgtcgccgtgcggttcacccaggaggaatgggctctgctggatccttctcagaaaatcctgtaccgggacgtgatgagagagacataccggaatctgacctccgtgggcatcaactgggaatgttgggaccttgaagcctgcttcagaagcctgggaagaaacctgagagtgcaggtggtgaagagaaagtgcgagctgaccaacagcggcccctgcgccgagggcggcccaagcagcggcgcccctcctcccagcggcggcagcccagccggctccccaacctctaccgaggagggcacctctgagtccgccacccccgagagcggccctggcacctccaccgagcccagcgagggcagcgcacccggcagccctgccggcagccccacctccacagaggagggaaccagcaccgagcccagcgaaggcagcgccccaggcaccagcaccgagcctagtgagcaggagattaaacggatcaacaagatcagaagaagacttgtgaaagacagcaacaccaagaaggccggcaagacaggccccatgaaaaccctgctggttagagtgatgacacccgatctgagagagcggctggaaaacctgagaaagaagcctgaaaatatcccccagcccatcagcaatacatctagagccaacctgaataagctgctgaccgattacaccgaaatgaagaaggcgatcctgcatgtgtactgggaagagttccagaaggaccctgtgggcctgatgagccgggtggcccagcctgccagcaagaagatcgatcagaacaagctgaaacctgagatggacgagaagggcaacctgaccaccgccggctttgcctgctctcagtgtggccagcccctgttcgtgtacaagctggagcaggtgtctgagaagggcaaggcttacaccaactacttcggacggtgcaatgtggccgagcacgaaaagctgatcctgctggcccagctgaagcccgagaaggatagcgacgaagccgtgacatatagcctgggaaagtttgggcagagggccctggatttctacagcattcatgtgaccaaggagtccacccaccccgtgaagcccctggcccagatcgccggaaacagatacgcctccggacctgtgggaaaggccctgagcgacgcatgtatgggcacaatcgcctccttcctgtctaagtaccaggacatcatcatcgaacaccagaaggtggtgaagggcaaccagaagagactggagagcctgcgggagctggccggcaaggaaaacctggaataccctagcgtgaccctgccacctcagcctcacaccaaggagggcgttgatgcctacaacgaagtgatcgcccgggtgcgaatgtgggtgaacctgaacctgtggcagaagctgaagctaagcagagatgatgccaagcctctgctgagactgaagggattcccttcctttcctctggtcgagagacaggccaacgaagtggactggtgggacatggtgtgtaacgtgaagaagctgatcaacgagaaaaaggaggatggcaaggtgttttggcagaatctggctggctacaagagacaggaagccctgagaccatacctgagcagcgaggaagatcggaagaagggaaagaaattcgctcggtaccagctgggcgacctgctgctgcacctggaaaagaagcacggcgaggactggggaaaggtgtacgacgaggcctgggagcggattgacaagaaagtggaaggcctgagcaagcacatcaagctggaagaggaacggagaagcgaggacgcccagagcaaggccgccctgaccgactggctgcgggctaaggccagcttcgtgatcgagggcctgaaggaggccgacaaggacgagttctgcagatgcgagctgaagctgcagaagtggtacggggacctgcggggaaagcccttcgccatcgaagccgagaacagcatcctggacatcagcggcttcagcaagcagtacaactgtgccttcatctggcagaaggacggcgtgaagaagctgaacctgtacctgatcatcaactacttcaagggcggcaagctgcggttcaagaagatcaaacctgaagccttcgaagccaacagattctacaccgtgatcaacaaaaagagcggcgagatcgtgcccatggaggtgaacttcaacttcgacgaccccaacctgatcatcctgcctctggcctttggcaagagacagggcagagaattcatctggaacgacctgctgtccctggaaaccggcagcctgaagctggccaacggaagagtgatcgagaagacactgtacaacagaagaacccggcaggatgagcctgccctgttcgtggccctgaccttcgagcggcgggaggtcctggactcctccaatatcaaaccaatgaacctgatcggcgtggcaagaggcgaaaacatccccgccgtgatcgccctgaccgaccccgagggctgcccactgagccggtttaaggatagcctgggaaacccaacccacatcctgagaatcggcgagagctataaggagaagcagcggaccatccaggccaagaaggaggtggagcagcggagagccggcggctacagccggaagtacgccagcaaagccaagaatctggcagacgatatggtgagaaacaccgctagagatctgctgtactacgccgtgacccaggatgccatgctgatcttcgccaacctgagccggggcttcggccggcagggcaagcggaccttcatggccgagagacagtacacacggatggaggactggctgaccgccaagctggcctacgagggcctgagcaagacctacctgtccaagacactggcccagtacacctccaagacatgcagcaactgtgggtttaccatcaccagcgccgactacgacagggtgctggagaagctgaagaagacagcaacaggctggatgaccacaattaacggcaaggagctgaaggtggagggccagattacctactacaacagatacaagagacagaacgtagtcaaggacctgtccgtcgagctggatagactgagcgaagaatctgtgaacaacgacatctcctcctggacaaagggcagaagcggagaagctctgagcctcctgaagaaaagattctcccatagacccgtgcaggagaagttcgtgtgcctgaactgcggcttcgagacacacgcagccgagcaagccgccctgaacatcgccagatcctggctgttcctgcggagccaggagtacaagaaataccagacaaacaagacaaccggcaacaccgataagagagccttcgtcgagacctggcagtccttttaccggaagaagcttaaggaggtgtggaaacctgccgtgcggtctggcggatctggcggaggctcctctaaagcccctatcacattcggcgacctggccatctacttcagccaggaggaatgggagtggctgagccccatccagaaggacctgtacgaggacgtgatgctggaaaactacagaaatctggtgtccctgggcctcagctttagacgccccaacgtgatcaccctgctggaaaagggcaaggccccatggatggtcgagcctgctagacggcggagaggacctgatagcggcagcaaggtgggcggcccaagcagcggcgcccctcctcccagcggcggcagcccagccggctccccaacctctaccgaggagggcacctctgagtccgccacccccgagagcggccctggcacctccaccgagcccagcgagggcagcgcacccggcagccctgccggcagccccacctccacagaggagggaaccagcaccgagcccagcgaaggcagcgccccaggcaccagcaccgagcctagtgagcaggagattaaacggatcaacaagatcagaagaagacttgtgaaagacagcaacaccaagaaggccggcaagacaggccccatgaaaaccctgctggttagagtgatgacacccgatctgagagagcggctggaaaacctgagaaagaagcctgaaaatatcccccagcccatcagcaatacatctagagccaacctgaataagctgctgaccgattacaccgaaatgaagaaggcgatcctgcatgtgtactgggaagagttccagaaggaccctgtgggcctgatgagccgggtggcccagcctgccagcaagaagatcgatcagaacaagctgaaacctgagatggacgagaagggcaacctgaccaccgccggctttgcctgctctcagtgtggccagcccctgttcgtgtacaagctggagcaggtgtctgagaagggcaaggcttacaccaactacttcggacggtgcaatgtggccgagcacgaaaagctgatcctgctggcccagctgaagcccgagaaggatagcgacgaagccgtgacatatagcctgggaaagtttgggcagagggccctggatttctacagcattcatgtgaccaaggagtccacccaccccgtgaagcccctggcccagatcgccggaaacagatacgcctccggacctgtgggaaaggccctgagcgacgcatgtatgggcacaatcgcctccttcctgtctaagtaccaggacatcatcatcgaacaccagaaggtggtgaagggcaaccagaagagactggagagcctgcgggagctggccggcaaggaaaacctggaataccctagcgtgaccctgccacctcagcctcacaccaaggagggcgttgatgcctacaacgaagtgatcgcccgggtgcgaatgtgggtgaacctgaacctgtggcagaagctgaagctaagcagagatgatgccaagcctctgctgagactgaagggattcccttcctttcctctggtcgagagacaggccaacgaagtggactggtgggacatggtgtgtaacgtgaagaagctgatcaacgagaaaaaggaggatggcaaggtgttttggcagaatctggctggctacaagagacaggaagccctgagaccatacctgagcagcgaggaagatcggaagaagggaaagaaattcgctcggtaccagctgggcgacctgctgctgcacctggaaaagaagcacggcgaggactggggaaaggtgtacgacgaggcctgggagcggattgacaagaaagtggaaggcctgagcaagcacatcaagctggaagaggaacggagaagcgaggacgcccagagcaaggccgccctgaccgactggctgcgggctaaggccagcttcgtgatcgagggcctgaaggaggccgacaaggacgagttctgcagatgcgagctgaagctgcagaagtggtacggggacctgcggggaaagcccttcgccatcgaagccgagaacagcatcctggacatcagcggcttcagcaagcagtacaactgtgccttcatctggcagaaggacggcgtgaagaagctgaacctgtacctgatcatcaactacttcaagggcggcaagctgcggttcaagaagatcaaacctgaagccttcgaagccaacagattctacaccgtgatcaacaaaaagagcggcgagatcgtgcccatggaggtgaacttcaacttcgacgaccccaacctgatcatcctgcctctggcctttggcaagagacagggcagagaattcatctggaacgacctgctgtccctggaaaccggcagcctgaagctggccaacggaagagtgatcgagaagacactgtacaacagaagaacccggcaggatgagcctgccctgttcgtggccctgaccttcgagcggcgggaggtcctggactcctccaatatcaaaccaatgaacctgatcggcgtggcaagaggcgaaaacatccccgccgtgatcgccctgaccgaccccgagggctgcccactgagccggtttaaggatagcctgggaaacccaacccacatcctgagaatcggcgagagctataaggagaagcagcggaccatccaggccaagaaggaggtggagcagcggagagccggcggctacagccggaagtacgccagcaaagccaagaatctggcagacgatatggtgagaaacaccgctagagatctgctgtactacgccgtgacccaggatgccatgctgatcttcgccaacctgagccggggcttcggccggcagggcaagcggaccttcatggccgagagacagtacacacggatggaggactggctgaccgccaagctggcctacgagggcctgagcaagacctacctgtccaagacactggcccagtacacctccaagacatgcagcaactgtgggtttaccatcaccagcgccgactacgacagggtgctggagaagctgaagaagacagcaacaggctggatgaccacaattaacggcaaggagctgaaggtggagggccagattacctactacaacagatacaagagacagaacgtagtcaaggacctgtccgtcgagctggatagactgagcgaagaatctgtgaacaacgacatctcctcctggacaaagggcagaagcggagaagctctgagcctcctgaagaaaagattctcccatagacccgtgcaggagaagttcgtgtgcctgaactgcggcttcgagacacacgcagccgagcaagccgccctgaacatcgccagatcctggctgttcctgcggagccaggagtacaagaaataccagacaaacaagacaaccggcaacaccgataagagagccttcgtcgagacctggcagtccttttaccggaagaagcttaaggaggtgtggaaacctgccgtgcggtctggcggatctggcggaggctcctctgctgaccttcgaggacgtcgccgtgtccttcagcgaggaagaatgggagctgctcgatcctcctcagaaaaccctgtacaacgacgtgatgcaagagaactacgagacagtgatctctctgggcctgaagctgaagaacgacaccggaaatgatcagcccatcagcatcagcgccctggaaatgcaggccagcggcagcaaggtgctgcggaaggccagaatgaaagtggctcagaagacaggatctggctccggcagcggccccaagaaaaagagaaaagtctaagctgccttctgcggggcttgccttctggccatgcccttcttctctcccttgcacctgtacctcttggtctttgaataaagcctgagtaggaaggctagcaaaaaaaaaaaaaaaaaaaaaaaaaaaaaaaaaaaaaaaaaaaaaaaaaaaaaaaaaaaaaaaaaaaaaaaaaaaaaaaa

SEQ ID NO: 18548 - RNA, 9485 nt, synthetic construct
  source 1..9485: mol_type = other RNA
aggaaataagagagaaaagaagagtaagaagaaatataagagccaccatggcccctaagaagaagcgtaaagtgagccggatggaacgcctcgtctacgaggtgcggcagaagtgcagaaacatcgaggacatctgcatctcctgcggatctctgaacgtgaccctggagcacccactgttcatcggcggcatgtgccagaactgtaaaaactgttttctggagtgtgcctatcaatacgacgatgacggctaccagagctactgcaccatctgttgcggcggaagagaggtgctgatgtgtggaaataacaactgctgccggtgcttctgcgtggaatgcgtggacctgctggtgggccccggcgccgcccaggccgctattaaggaagatccttggaactgctacatgtgcggccacaagggcacatacggcctgctgagacggagagaggactggcctagcagactgcagatgttcttcgccaataaccacgaccaggagttcgacccccctaaggtgtaccctcccgtccccgccgagaagagaaagcccatccgggtcctgagcctgttcgatggcatcgccaccggtctgctggtgctgaaggacctgggcatccaggtggataggtacattgcctccgaggtgtgcgaggactccatcaccgtgggaatggtgcgtcatcagggcaagatcatgtacgtgggcgacgtgcggagcgtgacacagaagcatatccaggagtggggccctttcgacctggtgatcggcggcagcccttgcaatgacctgagcatcgtgaacccagcccggaagggcctgtacgagggaaccggcagactgttcttcgagttttacagactgctgcacgacgcccggcctaaggaaggcgacgaccggcccttcttttggctgttcgagaatgtggtggccatgggagtcagcgacaagcgggatattagccggttcctggagagcaaccccgtgatgatcgatgccaaggaagtgagcgccgcccaccgggccagatacttctggggcaatctgcctggcatgaacagacccctggccagcaccgtgaacgacaagctggagctgcaggagtgcctggagcacggccggatcgccaagttcagcaaggtgagaaccatcaccacccgaagcaacagcatcaaacaaggcaaggaccagcactttcctgtgttcatgaacgagaaggaggacatcctgtggtgtaccgagatggagagagtgttcgggttcccagtccactacacagatgtcagcaacatgtctagactggccagacagagactgctgggaagaagctggtccgtccctgtgatcagacacctgttcgcccctctgaaggagtacttcgcctgcgtgagcagcggcaacagcaacgccaacagccggggccccagcttctctagcggcctggtgccactgtccctgagagggagccacatgggccccatggagatctacaaaaccgtgagcgcctggaagcggcagcctgtgcgcgtgctgagcctgtttcggaatatcgataaagtcctgaaaagcctgggattcctggagagcggctctggctccggcggtggcaccctgaagtacgtggaggatgtgacaaacgtggtcagacgggatgtggagaagtggggccccttcgatctggtgtacggcagcacccaacccctgggcagctcttgtgaccggtgccctggctggtacatgtttcagttccaccggatcctgcagtacgccctgccgagacaggagtcccagcggccattcttttggattttcatggacaacttgctgctgaccgaggatgaccaggaaactaccactcggttcctgcagaccgaagccgtgaccctgcaggacgtgagaggccgggactaccagaacgccatgcgggtgtggtccaacatccctggactgaaaagcaagcacgcacctctgacccctaaagaagaggagtacctgcaggcccaggtgcggagcagaagcaagctggacgcccctaaggtggatctgctggtgaagaattgcctcctgcccctgagagagtacttcaagtatttcagccagaatagtctgcccctgggaggcagcggcggcggcgccctggtgacatttgaggacgtcgccgtgcggttcacccaggaggaatgggctctgctggatccttctcagaaaatcctgtaccgggacgtgatgagagagacataccggaatctgacctccgtgggcatcaactgggaatgttgggaccttgaagcctgcttcagaagcctgggaagaaacctgagagtgcaggtggtgaagagaaagtgcgagctgaccaacagcggcccctgcgccgagggcggcccaagcagcggcgcccctcctcccagcggcggcagcccagccggctccccaacctctaccgaggagggcacctctgagtccgccacccccgagagcggccctggcacctccaccgagcccagcgagggcagcgcacccggcagccctgccggcagccccacctccacagaggagggaaccagcaccgagcccagcgaaggcagcgccccaggcaccagcaccgagcctagtgagcaggagattaaacggatcaacaagatcagaagaagacttgtgaaagacagcaacaccaagaaggccggcaagacaggccccatgaaaaccctgctggttagagtgatgacacccgatctgagagagcggctggaaaacctgagaaagaagcctgaaaatatcccccagcccatcagcaatacatctagagccaacctgaataagctgctgaccgattacaccgaaatgaagaaggcgatcctgcatgtgtactgggaagagttccagaaggaccctgtgggcctgatgagccgggtggcccagcctgccagcaagaagatcgatcagaacaagctgaaacctgagatggacgagaagggcaacctgaccaccgccggctttgcctgctctcagtgtggccagcccctgttcgtgtacaagctggagcaggtgtctgagaagggcaaggcttacaccaactacttcggacggtgcaatgtggccgagcacgaaaagctgatcctgctggcccagctgaagcccgagaaggatagcgacgaagccgtgacatatagcctgggaaagtttgggcagagggccctggatttctacagcattcatgtgaccaaggagtccacccaccccgtgaagcccctggcccagatcgccggaaacagatacgcctccggacctgtgggaaaggccctgagcgacgcatgtatgggcacaatcgcctccttcctgtctaagtaccaggacatcatcatcgaacaccagaaggtggtgaagggcaaccagaagagactggagagcctgcgggagctggccggcaaggaaaacctggaataccctagcgtgaccctgccacctcagcctcacaccaaggagggcgttgatgcctacaacgaagtgatcgcccgggtgcgaatgtgggtgaacctgaacctgtggcagaagctgaagctaagcagagatgatgccaagcctctgctgagactgaagggattcccttcctttcctctggtcgagagacaggccaacgaagtggactggtgggacatggtgtgtaacgtgaagaagctgatcaacgagaaaaaggaggatggcaaggtgttttggcagaatctggctggctacaagagacaggaagccctgagaccatacctgagcagcgaggaagatcggaagaagggaaagaaattcgctcggtaccagctgggcgacctgctgctgcacctggaaaagaagcacggcgaggactggggaaaggtgtacgacgaggcctgggagcggattgacaagaaagtggaaggcctgagcaagcacatcaagctggaagaggaacggagaagcgaggacgcccagagcaaggccgccctgaccgactggctgcgggctaaggccagcttcgtgatcgagggcctgaaggaggccgacaaggacgagttctgcagatgcgagctgaagctgcagaagtggtacggggacctgcggggaaagcccttcgccatcgaagccgagaacagcatcctggacatcagcggcttcagcaagcagtacaactgtgccttcatctggcagaaggacggcgtgaagaagctgaacctgtacctgatcatcaactacttcaagggcggcaagctgcggttcaagaagatcaaacctgaagccttcgaagccaacagattctacaccgtgatcaacaaaaagagcggcgagatcgtgcccatggaggtgaacttcaacttcgacgaccccaacctgatcatcctgcctctggcctttggcaagagacagggcagagaattcatctggaacgacctgctgtccctggaaaccggcagcctgaagctggccaacggaagagtgatcgagaagacactgtacaacagaagaacccggcaggatgagcctgccctgttcgtggccctgaccttcgagcggcgggaggtcctggactcctccaatatcaaaccaatgaacctgatcggcgtggcaagaggcgaaaacatccccgccgtgatcgccctgaccgaccccgagggctgcccactgagccggtttaaggatagcctgggaaacccaacccacatcctgagaatcggcgagagctataaggagaagcagcggaccatccaggccaagaaggaggtggagcagcggagagccggcggctacagccggaagtacgccagcaaagccaagaatctggcagacgatatggtgagaaacaccgctagagatctgctgtactacgccgtgacccaggatgccatgctgatcttcgccaacctgagccggggcttcggccggcagggcaagcggaccttcatggccgagagacagtacacacggatggaggactggctgaccgccaagctggcctacgagggcctgagcaagacctacctgtccaagacactggcccagtacacctccaagacatgcagcaactgtgggtttaccatcaccagcgccgactacgacagggtgctggagaagctgaagaagacagcaacaggctggatgaccacaattaacggcaaggagctgaaggtggagggccagattacctactacaacagatacaagagacagaacgtagtcaaggacctgtccgtcgagctggatagactgagcgaagaatctgtgaacaacgacatctcctcctggacaaagggcagaagcggagaagctctgagcctcctgaagaaaagattctcccatagacccgtgcaggagaagttcgtgtgcctgaactgcggcttcgagacacacgcagccgagcaagccgccctgaacatcgccagatcctggctgttcctgcggagccaggagtacaagaaataccagacaaacaagacaaccggcaacaccgataagagagccttcgtcgagacctggcagtccttttaccggaagaagcttaaggaggtgtggaaacctgccgtgcggtctggcggatctggcggaggctccgagatgggcctgctgacattcagagacatcgctatcgagttcagcctggaggaatggcaatgtctggactgcgcccagagaaatctgtacagagatgtgatgctggaaaactaccggaacctggtgtctctgggcatcgccgtgtccaagcccgacctgatcacctgcctcgagcagaacaaggaaagccagaacatcaagcggaacaaaatggtcgccaagcaccctgtgatgcacagccacggcggcccaagcagcggcgcccctcctcccagcggcggcagcccagccggctccccaacctctaccgaggagggcacctctgagtccgccacccccgagagcggccctggcacctccaccgagcccagcgagggcagcgcacccggcagccctgccggcagccccacctccacagaggagggaaccagcaccgagcccagcgaaggcagcgccccaggcaccagcaccgagcctagtgagcaggagattaaacggatcaacaagatcagaagaagacttgtgaaagacagcaacaccaagaaggccggcaagacaggccccatgaaaaccctgctggttagagtgatgacacccgatctgagagagcggctggaaaacctgagaaagaagcctgaaaatatcccccagcccatcagcaatacatctagagccaacctgaataagctgctgaccgattacaccgaaatgaagaaggcgatcctgcatgtgtactgggaagagttccagaaggaccctgtgggcctgatgagccgggtggcccagcctgccagcaagaagatcgatcagaacaagctgaaacctgagatggacgagaagggcaacctgaccaccgccggctttgcctgctctcagtgtggccagcccctgttcgtgtacaagctggagcaggtgtctgagaagggcaaggcttacaccaactacttcggacggtgcaatgtggccgagcacgaaaagctgatcctgctggcccagctgaagcccgagaaggatagcgacgaagccgtgacatatagcctgggaaagtttgggcagagggccctggatttctacagcattcatgtgaccaaggagtccacccaccccgtgaagcccctggcccagatcgccggaaacagatacgcctccggacctgtgggaaaggccctgagcgacgcatgtatgggcacaatcgcctccttcctgtctaagtaccaggacatcatcatcgaacaccagaaggtggtgaagggcaaccagaagagactggagagcctgcgggagctggccggcaaggaaaacctggaataccctagcgtgaccctgccacctcagcctcacaccaaggagggcgttgatgcctacaacgaagtgatcgcccgggtgcgaatgtgggtgaacctgaacctgtggcagaagctgaagctaagcagagatgatgccaagcctctgctgagactgaagggattcccttcctttcctctggtcgagagacaggccaacgaagtggactggtgggacatggtgtgtaacgtgaagaagctgatcaacgagaaaaaggaggatggcaaggtgttttggcagaatctggctggctacaagagacaggaagccctgagaccatacctgagcagcgaggaagatcggaagaagggaaagaaattcgctcggtaccagctgggcgacctgctgctgcacctggaaaagaagcacggcgaggactggggaaaggtgtacgacgaggcctgggagcggattgacaagaaagtggaaggcctgagcaagcacatcaagctggaagaggaacggagaagcgaggacgcccagagcaaggccgccctgaccgactggctgcgggctaaggccagcttcgtgatcgagggcctgaaggaggccgacaaggacgagttctgcagatgcgagctgaagctgcagaagtggtacggggacctgcggggaaagcccttcgccatcgaagccgagaacagcatcctggacatcagcggcttcagcaagcagtacaactgtgccttcatctggcagaaggacggcgtgaagaagctgaacctgtacctgatcatcaactacttcaagggcggcaagctgcggttcaagaagatcaaacctgaagccttcgaagccaacagattctacaccgtgatcaacaaaaagagcggcgagatcgtgcccatggaggtgaacttcaacttcgacgaccccaacctgatcatcctgcctctggcctttggcaagagacagggcagagaattcatctggaacgacctgctgtccctggaaaccggcagcctgaagctggccaacggaagagtgatcgagaagacactgtacaacagaagaacccggcaggatgagcctgccctgttcgtggccctgaccttcgagcggcgggaggtcctggactcctccaatatcaaaccaatgaacctgatcggcgtggcaagaggcgaaaacatccccgccgtgatcgccctgaccgaccccgagggctgcccactgagccggtttaaggatagcctgggaaacccaacccacatcctgagaatcggcgagagctataaggagaagcagcggaccatccaggccaagaaggaggtggagcagcggagagccggcggctacagccggaagtacgccagcaaagccaagaatctggcagacgatatggtgagaaacaccgctagagatctgctgtactacgccgtgacccaggatgccatgctgatcttcgccaacctgagccggggcttcggccggcagggcaagcggaccttcatggccgagagacagtacacacggatggaggactggctgaccgccaagctggcctacgagggcctgagcaagacctacctgtccaagacactggcccagtacacctccaagacatgcagcaactgtgggtttaccatcaccagcgccgactacgacagggtgctggagaagctgaagaagacagcaacaggctggatgaccacaattaacggcaaggagctgaaggtggagggccagattacctactacaacagatacaagagacagaacgtagtcaaggacctgtccgtcgagctggatagactgagcgaagaatctgtgaacaacgacatctcctcctggacaaagggcagaagcggagaagctctgagcctcctgaagaaaagattctcccatagacccgtgcaggagaagttcgtgtgcctgaactgcggcttcgagacacacgcagccgagcaagccgccctgaacatcgccagatcctggctgttcctgcggagccaggagtacaagaaataccagacaaacaagacaaccggcaacaccgataagagagccttcgtcgagacctggcagtccttttaccggaagaagcttaaggaggtgtggaaacctgccgtgcggtctggcggatctggcggaggctcctgccctggtgacatttgaggacgtcgccgtgcggttcacccaggaggaatgggctctgctggatccttctcagaaaatcctgtaccgggacgtgatgagagagacataccggaatctgacctccgtgggcatcaactgggaatgttgggaccttgaagcctgcttcagaagcctgggaagaaacctgagagtgcaggtggtgaagagaaagtgcgagctgaccaacagcggcccctgcgccgagggatctggctccggcagcggccccaagaaaaagagaaaagtctaagctgccttctgcggggcttgccttctggccatgcccttcttctctcccttgcacctgtacctcttggtctttgaataaagcctgagtaggaaggctagcaaaaaaaaaaaaaaaaaaaaaaaaaaaaaaaaaaaaaaaaaaaaaaaaaaaaaaaaaaaaaaaaaaaaaaaaaaaaaaaa

SEQ ID NO: 18549 - RNA, 9485 nt, synthetic construct
  source 1..9485: mol_type = other RNA
aggaaataagagagaaaagaagagtaagaagaaatataagagccaccatggcccctaagaagaagcgtaaagtgagccggatggaacgcctcgtctacgaggtgcggcagaagtgcagaaacatcgaggacatctgcatctcctgcggatctctgaacgtgaccctggagcacccactgttcatcggcggcatgtgccagaactgtaaaaactgttttctggagtgtgcctatcaatacgacgatgacggctaccagagctactgcaccatctgttgcggcggaagagaggtgctgatgtgtggaaataacaactgctgccggtgcttctgcgtggaatgcgtggacctgctggtgggccccggcgccgcccaggccgctattaaggaagatccttggaactgctacatgtgcggccacaagggcacatacggcctgctgagacggagagaggactggcctagcagactgcagatgttcttcgccaataaccacgaccaggagttcgacccccctaaggtgtaccctcccgtccccgccgagaagagaaagcccatccgggtcctgagcctgttcgatggcatcgccaccggtctgctggtgctgaaggacctgggcatccaggtggataggtacattgcctccgaggtgtgcgaggactccatcaccgtgggaatggtgcgtcatcagggcaagatcatgtacgtgggcgacgtgcggagcgtgacacagaagcatatccaggagtggggccctttcgacctggtgatcggcggcagcccttgcaatgacctgagcatcgtgaacccagcccggaagggcctgtacgagggaaccggcagactgttcttcgagttttacagactgctgcacgacgcccggcctaaggaaggcgacgaccggcccttcttttggctgttcgagaatgtggtggccatgggagtcagcgacaagcgggatattagccggttcctggagagcaaccccgtgatgatcgatgccaaggaagtgagcgccgcccaccgggccagatacttctggggcaatctgcctggcatgaacagacccctggccagcaccgtgaacgacaagctggagctgcaggagtgcctggagcacggccggatcgccaagttcagcaaggtgagaaccatcaccacccgaagcaacagcatcaaacaaggcaaggaccagcactttcctgtgttcatgaacgagaaggaggacatcctgtggtgtaccgagatggagagagtgttcgggttcccagtccactacacagatgtcagcaacatgtctagactggccagacagagactgctgggaagaagctggtccgtccctgtgatcagacacctgttcgcccctctgaaggagtacttcgcctgcgtgagcagcggcaacagcaacgccaacagccggggccccagcttctctagcggcctggtgccactgtccctgagagggagccacatgggccccatggagatctacaaaaccgtgagcgcctggaagcggcagcctgtgcgcgtgctgagcctgtttcggaatatcgataaagtcctgaaaagcctgggattcctggagagcggctctggctccggcggtggcaccctgaagtacgtggaggatgtgacaaacgtggtcagacgggatgtggagaagtggggccccttcgatctggtgtacggcagcacccaacccctgggcagctcttgtgaccggtgccctggctggtacatgtttcagttccaccggatcctgcagtacgccctgccgagacaggagtcccagcggccattcttttggattttcatggacaacttgctgctgaccgaggatgaccaggaaactaccactcggttcctgcagaccgaagccgtgaccctgcaggacgtgagaggccgggactaccagaacgccatgcgggtgtggtccaacatccctggactgaaaagcaagcacgcacctctgacccctaaagaagaggagtacctgcaggcccaggtgcggagcagaagcaagctggacgcccctaaggtggatctgctggtgaagaattgcctcctgcccctgagagagtacttcaagtatttcagccagaatagtctgcccctgggaggcagcggcggcggcgccctggtgacatttgaggacgtcgccgtgcggttcacccaggaggaatgggctctgctggatccttctcagaaaatcctgtaccgggacgtgatgagagagacataccggaatctgacctccgtgggcatcaactgggaatgttgggaccttgaagcctgcttcagaagcctgggaagaaacctgagagtgcaggtggtgaagagaaagtgcgagctgaccaacagcggcccctgcgccgagggcggcccaagcagcggcgcccctcctcccagcggcggcagcccagccggctccccaacctctaccgaggagggcacctctgagtccgccacccccgagagcggccctggcacctccaccgagcccagcgagggcagcgcacccggcagccctgccggcagccccacctccacagaggagggaaccagcaccgagcccagcgaaggcagcgccccaggcaccagcaccgagcctagtgagcaggagattaaacggatcaacaagatcagaagaagacttgtgaaagacagcaacaccaagaaggccggcaagacaggccccatgaaaaccctgctggttagagtgatgacacccgatctgagagagcggctggaaaacctgagaaagaagcctgaaaatatcccccagcccatcagcaatacatctagagccaacctgaataagctgctgaccgattacaccgaaatgaagaaggcgatcctgcatgtgtactgggaagagttccagaaggaccctgtgggcctgatgagccgggtggcccagcctgccagcaagaagatcgatcagaacaagctgaaacctgagatggacgagaagggcaacctgaccaccgccggctttgcctgctctcagtgtggccagcccctgttcgtgtacaagctggagcaggtgtctgagaagggcaaggcttacaccaactacttcggacggtgcaatgtggccgagcacgaaaagctgatcctgctggcccagctgaagcccgagaaggatagcgacgaagccgtgacatatagcctgggaaagtttgggcagagggccctggatttctacagcattcatgtgaccaaggagtccacccaccccgtgaagcccctggcccagatcgccggaaacagatacgcctccggacctgtgggaaaggccctgagcgacgcatgtatgggcacaatcgcctccttcctgtctaagtaccaggacatcatcatcgaacaccagaaggtggtgaagggcaaccagaagagactggagagcctgcgggagctggccggcaaggaaaacctggaataccctagcgtgaccctgccacctcagcctcacaccaaggagggcgttgatgcctacaacgaagtgatcgcccgggtgcgaatgtgggtgaacctgaacctgtggcagaagctgaagctaagcagagatgatgccaagcctctgctgagactgaagggattcccttcctttcctctggtcgagagacaggccaacgaagtggactggtgggacatggtgtgtaacgtgaagaagctgatcaacgagaaaaaggaggatggcaaggtgttttggcagaatctggctggctacaagagacaggaagccctgagaccatacctgagcagcgaggaagatcggaagaagggaaagaaattcgctcggtaccagctgggcgacctgctgctgcacctggaaaagaagcacggcgaggactggggaaaggtgtacgacgaggcctgggagcggattgacaagaaagtggaaggcctgagcaagcacatcaagctggaagaggaacggagaagcgaggacgcccagagcaaggccgccctgaccgactggctgcgggctaaggccagcttcgtgatcgagggcctgaaggaggccgacaaggacgagttctgcagatgcgagctgaagctgcagaagtggtacggggacctgcggggaaagcccttcgccatcgaagccgagaacagcatcctggacatcagcggcttcagcaagcagtacaactgtgccttcatctggcagaaggacggcgtgaagaagctgaacctgtacctgatcatcaactacttcaagggcggcaagctgcggttcaagaagatcaaacctgaagccttcgaagccaacagattctacaccgtgatcaacaaaaagagcggcgagatcgtgcccatggaggtgaacttcaacttcgacgaccccaacctgatcatcctgcctctggcctttggcaagagacagggcagagaattcatctggaacgacctgctgtccctggaaaccggcagcctgaagctggccaacggaagagtgatcgagaagacactgtacaacagaagaacccggcaggatgagcctgccctgttcgtggccctgaccttcgagcggcgggaggtcctggactcctccaatatcaaaccaatgaacctgatcggcgtggcaagaggcgaaaacatccccgccgtgatcgccctgaccgaccccgagggctgcccactgagccggtttaaggatagcctgggaaacccaacccacatcctgagaatcggcgagagctataaggagaagcagcggaccatccaggccaagaaggaggtggagcagcggagagccggcggctacagccggaagtacgccagcaaagccaagaatctggcagacgatatggtgagaaacaccgctagagatctgctgtactacgccgtgacccaggatgccatgctgatcttcgccaacctgagccggggcttcggccggcagggcaagcggaccttcatggccgagagacagtacacacggatggaggactggctgaccgccaagctggcctacgagggcctgagcaagacctacctgtccaagacactggcccagtacacctccaagacatgcagcaactgtgggtttaccatcaccagcgccgactacgacagggtgctggagaagctgaagaagacagcaacaggctggatgaccacaattaacggcaaggagctgaaggtggagggccagattacctactacaacagatacaagagacagaacgtagtcaaggacctgtccgtcgagctggatagactgagcgaagaatctgtgaacaacgacatctcctcctggacaaagggcagaagcggagaagctctgagcctcctgaagaaaagattctcccatagacccgtgcaggagaagttcgtgtgcctgaactgcggcttcgagacacacgcagccgagcaagccgccctgaacatcgccagatcctggctgttcctgcggagccaggagtacaagaaataccagacaaacaagacaaccggcaacaccgataagagagccttcgtcgagacctggcagtccttttaccggaagaagcttaaggaggtgtggaaacctgccgtgcggtctggcggatctggcggaggctccgagatgggcctgctgacattcagagacatcgctatcgagttcagcctggaggaatggcaatgtctggactgcgcccagagaaatctgtacagagatgtgatgctggaaaactaccggaacctggtgtctctgggcatcgccgtgtccaagcccgacctgatcacctgcctcgagcagaacaaggaaagccagaacatcaagcggaacaaaatggtcgccaagcaccctgtgatgcacagccacggcggcccaagcagcggcgcccctcctcccagcggcggcagcccagccggctccccaacctctaccgaggagggcacctctgagtccgccacccccgagagcggccctggcacctccaccgagcccagcgagggcagcgcacccggcagccctgccggcagccccacctccacagaggagggaaccagcaccgagcccagcgaaggcagcgccccaggcaccagcaccgagcctagtgagcaggagattaaacggatcaacaagatcagaagaagacttgtgaaagacagcaacaccaagaaggccggcaagacaggccccatgaaaaccctgctggttagagtgatgacacccgatctgagagagcggctggaaaacctgagaaagaagcctgaaaatatcccccagcccatcagcaatacatctagagccaacctgaataagctgctgaccgattacaccgaaatgaagaaggcgatcctgcatgtgtactgggaagagttccagaaggaccctgtgggcctgatgagccgggtggcccagcctgccagcaagaagatcgatcagaacaagctgaaacctgagatggacgagaagggcaacctgaccaccgccggctttgcctgctctcagtgtggccagcccctgttcgtgtacaagctggagcaggtgtctgagaagggcaaggcttacaccaactacttcggacggtgcaatgtggccgagcacgaaaagctgatcctgctggcccagctgaagcccgagaaggatagcgacgaagccgtgacatatagcctgggaaagtttgggcagagggccctggatttctacagcattcatgtgaccaaggagtccacccaccccgtgaagcccctggcccagatcgccggaaacagatacgcctccggacctgtgggaaaggccctgagcgacgcatgtatgggcacaatcgcctccttcctgtctaagtaccaggacatcatcatcgaacaccagaaggtggtgaagggcaaccagaagagactggagagcctgcgggagctggccggcaaggaaaacctggaataccctagcgtgaccctgccacctcagcctcacaccaaggagggcgttgatgcctacaacgaagtgatcgcccgggtgcgaatgtgggtgaacctgaacctgtggcagaagctgaagctaagcagagatgatgccaagcctctgctgagactgaagggattcccttcctttcctctggtcgagagacaggccaacgaagtggactggtgggacatggtgtgtaacgtgaagaagctgatcaacgagaaaaaggaggatggcaaggtgttttggcagaatctggctggctacaagagacaggaagccctgagaccatacctgagcagcgaggaagatcggaagaagggaaagaaattcgctcggtaccagctgggcgacctgctgctgcacctggaaaagaagcacggcgaggactggggaaaggtgtacgacgaggcctgggagcggattgacaagaaagtggaaggcctgagcaagcacatcaagctggaagaggaacggagaagcgaggacgcccagagcaaggccgccctgaccgactggctgcgggctaaggccagcttcgtgatcgagggcctgaaggaggccgacaaggacgagttctgcagatgcgagctgaagctgcagaagtggtacggggacctgcggggaaagcccttcgccatcgaagccgagaacagcatcctggacatcagcggcttcagcaagcagtacaactgtgccttcatctggcagaaggacggcgtgaagaagctgaacctgtacctgatcatcaactacttcaagggcggcaagctgcggttcaagaagatcaaacctgaagccttcgaagccaacagattctacaccgtgatcaacaaaaagagcggcgagatcgtgcccatggaggtgaacttcaacttcgacgaccccaacctgatcatcctgcctctggcctttggcaagagacagggcagagaattcatctggaacgacctgctgtccctggaaaccggcagcctgaagctggccaacggaagagtgatcgagaagacactgtacaacagaagaacccggcaggatgagcctgccctgttcgtggccctgaccttcgagcggcgggaggtcctggactcctccaatatcaaaccaatgaacctgatcggcgtggcaagaggcgaaaacatccccgccgtgatcgccctgaccgaccccgagggctgcccactgagccggtttaaggatagcctgggaaacccaacccacatcctgagaatcggcgagagctataaggagaagcagcggaccatccaggccaagaaggaggtggagcagcggagagccggcggctacagccggaagtacgccagcaaagccaagaatctggcagacgatatggtgagaaacaccgctagagatctgctgtactacgccgtgacccaggatgccatgctgatcttcgccaacctgagccggggcttcggccggcagggcaagcggaccttcatggccgagagacagtacacacggatggaggactggctgaccgccaagctggcctacgagggcctgagcaagacctacctgtccaagacactggcccagtacacctccaagacatgcagcaactgtgggtttaccatcaccagcgccgactacgacagggtgctggagaagctgaagaagacagcaacaggctggatgaccacaattaacggcaaggagctgaaggtggagggccagattacctactacaacagatacaagagacagaacgtagtcaaggacctgtccgtcgagctggatagactgagcgaagaatctgtgaacaacgacatctcctcctggacaaagggcagaagcggagaagctctgagcctcctgaagaaaagattctcccatagacccgtgcaggagaagttcgtgtgcctgaactgcggcttcgagacacacgcagccgagcaagccgccctgaacatcgccagatcctggctgttcctgcggagccaggagtacaagaaataccagacaaacaagacaaccggcaacaccgataagagagccttcgtcgagacctggcagtccttttaccggaagaagcttaaggaggtgtggaaacctgccgtgcggtctggcggatctggcggaggctccttctacacctgtgaccttcgaggatgtggtggtctacttcaccgccgctgagtgggtgcacctgacaaactggcaaagagatttttatcaggccgtgatgatggaaacctacgagctggtggccagcgtggctggcgacggcgttccaatggccgaggacgaggaaggcggagtggaaagacccgtgtggcagtacatccccagaggcaagcggcggagaaagacccctcagcctcgcgccgacggatctggctccggcagcggccccaagaaaaagagaaaagtctaagctgccttctgcggggcttgccttctggccatgcccttcttctctcccttgcacctgtacctcttggtctttgaataaagcctgagtaggaaggctagcaaaaaaaaaaaaaaaaaaaaaaaaaaaaaaaaaaaaaaaaaaaaaaaaaaaaaaaaaaaaaaaaaaaaaaaaaaaaaaaa

SEQ ID NO: 18550 - RNA, 9485 nt, synthetic construct
  source 1..9485: mol_type = other RNA
aggaaataagagagaaaagaagagtaagaagaaatataagagccaccatggcccctaagaagaagcgtaaagtgagccggatggaacgcctcgtctacgaggtgcggcagaagtgcagaaacatcgaggacatctgcatctcctgcggatctctgaacgtgaccctggagcacccactgttcatcggcggcatgtgccagaactgtaaaaactgttttctggagtgtgcctatcaatacgacgatgacggctaccagagctactgcaccatctgttgcggcggaagagaggtgctgatgtgtggaaataacaactgctgccggtgcttctgcgtggaatgcgtggacctgctggtgggccccggcgccgcccaggccgctattaaggaagatccttggaactgctacatgtgcggccacaagggcacatacggcctgctgagacggagagaggactggcctagcagactgcagatgttcttcgccaataaccacgaccaggagttcgacccccctaaggtgtaccctcccgtccccgccgagaagagaaagcccatccgggtcctgagcctgttcgatggcatcgccaccggtctgctggtgctgaaggacctgggcatccaggtggataggtacattgcctccgaggtgtgcgaggactccatcaccgtgggaatggtgcgtcatcagggcaagatcatgtacgtgggcgacgtgcggagcgtgacacagaagcatatccaggagtggggccctttcgacctggtgatcggcggcagcccttgcaatgacctgagcatcgtgaacccagcccggaagggcctgtacgagggaaccggcagactgttcttcgagttttacagactgctgcacgacgcccggcctaaggaaggcgacgaccggcccttcttttggctgttcgagaatgtggtggccatgggagtcagcgacaagcgggatattagccggttcctggagagcaaccccgtgatgatcgatgccaaggaagtgagcgccgcccaccgggccagatacttctggggcaatctgcctggcatgaacagacccctggccagcaccgtgaacgacaagctggagctgcaggagtgcctggagcacggccggatcgccaagttcagcaaggtgagaaccatcaccacccgaagcaacagcatcaaacaaggcaaggaccagcactttcctgtgttcatgaacgagaaggaggacatcctgtggtgtaccgagatggagagagtgttcgggttcccagtccactacacagatgtcagcaacatgtctagactggccagacagagactgctgggaagaagctggtccgtccctgtgatcagacacctgttcgcccctctgaaggagtacttcgcctgcgtgagcagcggcaacagcaacgccaacagccggggccccagcttctctagcggcctggtgccactgtccctgagagggagccacatgggccccatggagatctacaaaaccgtgagcgcctggaagcggcagcctgtgcgcgtgctgagcctgtttcggaatatcgataaagtcctgaaaagcctgggattcctggagagcggctctggctccggcggtggcaccctgaagtacgtggaggatgtgacaaacgtggtcagacgggatgtggagaagtggggccccttcgatctggtgtacggcagcacccaacccctgggcagctcttgtgaccggtgccctggctggtacatgtttcagttccaccggatcctgcagtacgccctgccgagacaggagtcccagcggccattcttttggattttcatggacaacttgctgctgaccgaggatgaccaggaaactaccactcggttcctgcagaccgaagccgtgaccctgcaggacgtgagaggccgggactaccagaacgccatgcgggtgtggtccaacatccctggactgaaaagcaagcacgcacctctgacccctaaagaagaggagtacctgcaggcccaggtgcggagcagaagcaagctggacgcccctaaggtggatctgctggtgaagaattgcctcctgcccctgagagagtacttcaagtatttcagccagaatagtctgcccctgggaggcagcggcggcggcgccctggtgacatttgaggacgtcgccgtgcggttcacccaggaggaatgggctctgctggatccttctcagaaaatcctgtaccgggacgtgatgagagagacataccggaatctgacctccgtgggcatcaactgggaatgttgggaccttgaagcctgcttcagaagcctgggaagaaacctgagagtgcaggtggtgaagagaaagtgcgagctgaccaacagcggcccctgcgccgagggcggcccaagcagcggcgcccctcctcccagcggcggcagcccagccggctccccaacctctaccgaggagggcacctctgagtccgccacccccgagagcggccctggcacctccaccgagcccagcgagggcagcgcacccggcagccctgccggcagccccacctccacagaggagggaaccagcaccgagcccagcgaaggcagcgccccaggcaccagcaccgagcctagtgagcaggagattaaacggatcaacaagatcagaagaagacttgtgaaagacagcaacaccaagaaggccggcaagacaggccccatgaaaaccctgctggttagagtgatgacacccgatctgagagagcggctggaaaacctgagaaagaagcctgaaaatatcccccagcccatcagcaatacatctagagccaacctgaataagctgctgaccgattacaccgaaatgaagaaggcgatcctgcatgtgtactgggaagagttccagaaggaccctgtgggcctgatgagccgggtggcccagcctgccagcaagaagatcgatcagaacaagctgaaacctgagatggacgagaagggcaacctgaccaccgccggctttgcctgctctcagtgtggccagcccctgttcgtgtacaagctggagcaggtgtctgagaagggcaaggcttacaccaactacttcggacggtgcaatgtggccgagcacgaaaagctgatcctgctggcccagctgaagcccgagaaggatagcgacgaagccgtgacatatagcctgggaaagtttgggcagagggccctggatttctacagcattcatgtgaccaaggagtccacccaccccgtgaagcccctggcccagatcgccggaaacagatacgcctccggacctgtgggaaaggccctgagcgacgcatgtatgggcacaatcgcctccttcctgtctaagtaccaggacatcatcatcgaacaccagaaggtggtgaagggcaaccagaagagactggagagcctgcgggagctggccggcaaggaaaacctggaataccctagcgtgaccctgccacctcagcctcacaccaaggagggcgttgatgcctacaacgaagtgatcgcccgggtgcgaatgtgggtgaacctgaacctgtggcagaagctgaagctaagcagagatgatgccaagcctctgctgagactgaagggattcccttcctttcctctggtcgagagacaggccaacgaagtggactggtgggacatggtgtgtaacgtgaagaagctgatcaacgagaaaaaggaggatggcaaggtgttttggcagaatctggctggctacaagagacaggaagccctgagaccatacctgagcagcgaggaagatcggaagaagggaaagaaattcgctcggtaccagctgggcgacctgctgctgcacctggaaaagaagcacggcgaggactggggaaaggtgtacgacgaggcctgggagcggattgacaagaaagtggaaggcctgagcaagcacatcaagctggaagaggaacggagaagcgaggacgcccagagcaaggccgccctgaccgactggctgcgggctaaggccagcttcgtgatcgagggcctgaaggaggccgacaaggacgagttctgcagatgcgagctgaagctgcagaagtggtacggggacctgcggggaaagcccttcgccatcgaagccgagaacagcatcctggacatcagcggcttcagcaagcagtacaactgtgccttcatctggcagaaggacggcgtgaagaagctgaacctgtacctgatcatcaactacttcaagggcggcaagctgcggttcaagaagatcaaacctgaagccttcgaagccaacagattctacaccgtgatcaacaaaaagagcggcgagatcgtgcccatggaggtgaacttcaacttcgacgaccccaacctgatcatcctgcctctggcctttggcaagagacagggcagagaattcatctggaacgacctgctgtccctggaaaccggcagcctgaagctggccaacggaagagtgatcgagaagacactgtacaacagaagaacccggcaggatgagcctgccctgttcgtggccctgaccttcgagcggcgggaggtcctggactcctccaatatcaaaccaatgaacctgatcggcgtggcaagaggcgaaaacatccccgccgtgatcgccctgaccgaccccgagggctgcccactgagccggtttaaggatagcctgggaaacccaacccacatcctgagaatcggcgagagctataaggagaagcagcggaccatccaggccaagaaggaggtggagcagcggagagccggcggctacagccggaagtacgccagcaaagccaagaatctggcagacgatatggtgagaaacaccgctagagatctgctgtactacgccgtgacccaggatgccatgctgatcttcgccaacctgagccggggcttcggccggcagggcaagcggaccttcatggccgagagacagtacacacggatggaggactggctgaccgccaagctggcctacgagggcctgagcaagacctacctgtccaagacactggcccagtacacctccaagacatgcagcaactgtgggtttaccatcaccagcgccgactacgacagggtgctggagaagctgaagaagacagcaacaggctggatgaccacaattaacggcaaggagctgaaggtggagggccagattacctactacaacagatacaagagacagaacgtagtcaaggacctgtccgtcgagctggatagactgagcgaagaatctgtgaacaacgacatctcctcctggacaaagggcagaagcggagaagctctgagcctcctgaagaaaagattctcccatagacccgtgcaggagaagttcgtgtgcctgaactgcggcttcgagacacacgcagccgagcaagccgccctgaacatcgccagatcctggctgttcctgcggagccaggagtacaagaaataccagacaaacaagacaaccggcaacaccgataagagagccttcgtcgagacctggcagtccttttaccggaagaagcttaaggaggtgtggaaacctgccgtgcggtctggcggatctggcggaggctccgagatgggcctgctgacattcagagacatcgctatcgagttcagcctggaggaatggcaatgtctggactgcgcccagagaaatctgtacagagatgtgatgctggaaaactaccggaacctggtgtctctgggcatcgccgtgtccaagcccgacctgatcacctgcctcgagcagaacaaggaaagccagaacatcaagcggaacaaaatggtcgccaagcaccctgtgatgcacagccacggcggcccaagcagcggcgcccctcctcccagcggcggcagcccagccggctccccaacctctaccgaggagggcacctctgagtccgccacccccgagagcggccctggcacctccaccgagcccagcgagggcagcgcacccggcagccctgccggcagccccacctccacagaggagggaaccagcaccgagcccagcgaaggcagcgccccaggcaccagcaccgagcctagtgagcaggagattaaacggatcaacaagatcagaagaagacttgtgaaagacagcaacaccaagaaggccggcaagacaggccccatgaaaaccctgctggttagagtgatgacacccgatctgagagagcggctggaaaacctgagaaagaagcctgaaaatatcccccagcccatcagcaatacatctagagccaacctgaataagctgctgaccgattacaccgaaatgaagaaggcgatcctgcatgtgtactgggaagagttccagaaggaccctgtgggcctgatgagccgggtggcccagcctgccagcaagaagatcgatcagaacaagctgaaacctgagatggacgagaagggcaacctgaccaccgccggctttgcctgctctcagtgtggccagcccctgttcgtgtacaagctggagcaggtgtctgagaagggcaaggcttacaccaactacttcggacggtgcaatgtggccgagcacgaaaagctgatcctgctggcccagctgaagcccgagaaggatagcgacgaagccgtgacatatagcctgggaaagtttgggcagagggccctggatttctacagcattcatgtgaccaaggagtccacccaccccgtgaagcccctggcccagatcgccggaaacagatacgcctccggacctgtgggaaaggccctgagcgacgcatgtatgggcacaatcgcctccttcctgtctaagtaccaggacatcatcatcgaacaccagaaggtggtgaagggcaaccagaagagactggagagcctgcgggagctggccggcaaggaaaacctggaataccctagcgtgaccctgccacctcagcctcacaccaaggagggcgttgatgcctacaacgaagtgatcgcccgggtgcgaatgtgggtgaacctgaacctgtggcagaagctgaagctaagcagagatgatgccaagcctctgctgagactgaagggattcccttcctttcctctggtcgagagacaggccaacgaagtggactggtgggacatggtgtgtaacgtgaagaagctgatcaacgagaaaaaggaggatggcaaggtgttttggcagaatctggctggctacaagagacaggaagccctgagaccatacctgagcagcgaggaagatcggaagaagggaaagaaattcgctcggtaccagctgggcgacctgctgctgcacctggaaaagaagcacggcgaggactggggaaaggtgtacgacgaggcctgggagcggattgacaagaaagtggaaggcctgagcaagcacatcaagctggaagaggaacggagaagcgaggacgcccagagcaaggccgccctgaccgactggctgcgggctaaggccagcttcgtgatcgagggcctgaaggaggccgacaaggacgagttctgcagatgcgagctgaagctgcagaagtggtacggggacctgcggggaaagcccttcgccatcgaagccgagaacagcatcctggacatcagcggcttcagcaagcagtacaactgtgccttcatctggcagaaggacggcgtgaagaagctgaacctgtacctgatcatcaactacttcaagggcggcaagctgcggttcaagaagatcaaacctgaagccttcgaagccaacagattctacaccgtgatcaacaaaaagagcggcgagatcgtgcccatggaggtgaacttcaacttcgacgaccccaacctgatcatcctgcctctggcctttggcaagagacagggcagagaattcatctggaacgacctgctgtccctggaaaccggcagcctgaagctggccaacggaagagtgatcgagaagacactgtacaacagaagaacccggcaggatgagcctgccctgttcgtggccctgaccttcgagcggcgggaggtcctggactcctccaatatcaaaccaatgaacctgatcggcgtggcaagaggcgaaaacatccccgccgtgatcgccctgaccgaccccgagggctgcccactgagccggtttaaggatagcctgggaaacccaacccacatcctgagaatcggcgagagctataaggagaagcagcggaccatccaggccaagaaggaggtggagcagcggagagccggcggctacagccggaagtacgccagcaaagccaagaatctggcagacgatatggtgagaaacaccgctagagatctgctgtactacgccgtgacccaggatgccatgctgatcttcgccaacctgagccggggcttcggccggcagggcaagcggaccttcatggccgagagacagtacacacggatggaggactggctgaccgccaagctggcctacgagggcctgagcaagacctacctgtccaagacactggcccagtacacctccaagacatgcagcaactgtgggtttaccatcaccagcgccgactacgacagggtgctggagaagctgaagaagacagcaacaggctggatgaccacaattaacggcaaggagctgaaggtggagggccagattacctactacaacagatacaagagacagaacgtagtcaaggacctgtccgtcgagctggatagactgagcgaagaatctgtgaacaacgacatctcctcctggacaaagggcagaagcggagaagctctgagcctcctgaagaaaagattctcccatagacccgtgcaggagaagttcgtgtgcctgaactgcggcttcgagacacacgcagccgagcaagccgccctgaacatcgccagatcctggctgttcctgcggagccaggagtacaagaaataccagacaaacaagacaaccggcaacaccgataagagagccttcgtcgagacctggcagtccttttaccggaagaagcttaaggaggtgtggaaacctgccgtgcggtctggcggatctggcggaggctcctcaggacgtggtgacattcaaggacgtcgccatctacttcagccctgaggaatgggtgcggctgagcgccggacagagagaactgtaccaggaggtgatgctggacaactacgagctggtgaccagcctggatagagagagcaaactgctgtataagatggaccccgaggaagaaagctgcgagggcgtgccatacagctctgccgacagcggcgcccctgatagctcctccacctctgcttgtggatctggctccggcagcggccccaagaaaaagagaaaagtctaagctgccttctgcggggcttgccttctggccatgcccttcttctctcccttgcacctgtacctcttggtctttgaataaagcctgagtaggaaggctagcaaaaaaaaaaaaaaaaaaaaaaaaaaaaaaaaaaaaaaaaaaaaaaaaaaaaaaaaaaaaaaaaaaaaaaaaaaaaaaaa

SEQ ID NO: 18551 - RNA, 9512 nt, synthetic construct
  source 1..9512: mol_type = other RNA
aggaaataagagagaaaagaagagtaagaagaaatataagagccaccatggcccctaagaagaagcgtaaagtgagccggatggaacgcctcgtctacgaggtgcggcagaagtgcagaaacatcgaggacatctgcatctcctgcggatctctgaacgtgaccctggagcacccactgttcatcggcggcatgtgccagaactgtaaaaactgttttctggagtgtgcctatcaatacgacgatgacggctaccagagctactgcaccatctgttgcggcggaagagaggtgctgatgtgtggaaataacaactgctgccggtgcttctgcgtggaatgcgtggacctgctggtgggccccggcgccgcccaggccgctattaaggaagatccttggaactgctacatgtgcggccacaagggcacatacggcctgctgagacggagagaggactggcctagcagactgcagatgttcttcgccaataaccacgaccaggagttcgacccccctaaggtgtaccctcccgtccccgccgagaagagaaagcccatccgggtcctgagcctgttcgatggcatcgccaccggtctgctggtgctgaaggacctgggcatccaggtggataggtacattgcctccgaggtgtgcgaggactccatcaccgtgggaatggtgcgtcatcagggcaagatcatgtacgtgggcgacgtgcggagcgtgacacagaagcatatccaggagtggggccctttcgacctggtgatcggcggcagcccttgcaatgacctgagcatcgtgaacccagcccggaagggcctgtacgagggaaccggcagactgttcttcgagttttacagactgctgcacgacgcccggcctaaggaaggcgacgaccggcccttcttttggctgttcgagaatgtggtggccatgggagtcagcgacaagcgggatattagccggttcctggagagcaaccccgtgatgatcgatgccaaggaagtgagcgccgcccaccgggccagatacttctggggcaatctgcctggcatgaacagacccctggccagcaccgtgaacgacaagctggagctgcaggagtgcctggagcacggccggatcgccaagttcagcaaggtgagaaccatcaccacccgaagcaacagcatcaaacaaggcaaggaccagcactttcctgtgttcatgaacgagaaggaggacatcctgtggtgtaccgagatggagagagtgttcgggttcccagtccactacacagatgtcagcaacatgtctagactggccagacagagactgctgggaagaagctggtccgtccctgtgatcagacacctgttcgcccctctgaaggagtacttcgcctgcgtgagcagcggcaacagcaacgccaacagccggggccccagcttctctagcggcctggtgccactgtccctgagagggagccacatgggccccatggagatctacaaaaccgtgagcgcctggaagcggcagcctgtgcgcgtgctgagcctgtttcggaatatcgataaagtcctgaaaagcctgggattcctggagagcggctctggctccggcggtggcaccctgaagtacgtggaggatgtgacaaacgtggtcagacgggatgtggagaagtggggccccttcgatctggtgtacggcagcacccaacccctgggcagctcttgtgaccggtgccctggctggtacatgtttcagttccaccggatcctgcagtacgccctgccgagacaggagtcccagcggccattcttttggattttcatggacaacttgctgctgaccgaggatgaccaggaaactaccactcggttcctgcagaccgaagccgtgaccctgcaggacgtgagaggccgggactaccagaacgccatgcgggtgtggtccaacatccctggactgaaaagcaagcacgcacctctgacccctaaagaagaggagtacctgcaggcccaggtgcggagcagaagcaagctggacgcccctaaggtggatctgctggtgaagaattgcctcctgcccctgagagagtacttcaagtatttcagccagaatagtctgcccctgggaggcagcggcggcggcgccctggtgacatttgaggacgtcgccgtgcggttcacccaggaggaatgggctctgctggatccttctcagaaaatcctgtaccgggacgtgatgagagagacataccggaatctgacctccgtgggcatcaactgggaatgttgggaccttgaagcctgcttcagaagcctgggaagaaacctgagagtgcaggtggtgaagagaaagtgcgagctgaccaacagcggcccctgcgccgagggcggcccaagcagcggcgcccctcctcccagcggcggcagcccagccggctccccaacctctaccgaggagggcacctctgagtccgccacccccgagagcggccctggcacctccaccgagcccagcgagggcagcgcacccggcagccctgccggcagccccacctccacagaggagggaaccagcaccgagcccagcgaaggcagcgccccaggcaccagcaccgagcctagtgagcaggagattaaacggatcaacaagatcagaagaagacttgtgaaagacagcaacaccaagaaggccggcaagacaggccccatgaaaaccctgctggttagagtgatgacacccgatctgagagagcggctggaaaacctgagaaagaagcctgaaaatatcccccagcccatcagcaatacatctagagccaacctgaataagctgctgaccgattacaccgaaatgaagaaggcgatcctgcatgtgtactgggaagagttccagaaggaccctgtgggcctgatgagccgggtggcccagcctgccagcaagaagatcgatcagaacaagctgaaacctgagatggacgagaagggcaacctgaccaccgccggctttgcctgctctcagtgtggccagcccctgttcgtgtacaagctggagcaggtgtctgagaagggcaaggcttacaccaactacttcggacggtgcaatgtggccgagcacgaaaagctgatcctgctggcccagctgaagcccgagaaggatagcgacgaagccgtgacatatagcctgggaaagtttgggcagagggccctggatttctacagcattcatgtgaccaaggagtccacccaccccgtgaagcccctggcccagatcgccggaaacagatacgcctccggacctgtgggaaaggccctgagcgacgcatgtatgggcacaatcgcctccttcctgtctaagtaccaggacatcatcatcgaacaccagaaggtggtgaagggcaaccagaagagactggagagcctgcgggagctggccggcaaggaaaacctggaataccctagcgtgaccctgccacctcagcctcacaccaaggagggcgttgatgcctacaacgaagtgatcgcccgggtgcgaatgtgggtgaacctgaacctgtggcagaagctgaagctaagcagagatgatgccaagcctctgctgagactgaagggattcccttcctttcctctggtcgagagacaggccaacgaagtggactggtgggacatggtgtgtaacgtgaagaagctgatcaacgagaaaaaggaggatggcaaggtgttttggcagaatctggctggctacaagagacaggaagccctgagaccatacctgagcagcgaggaagatcggaagaagggaaagaaattcgctcggtaccagctgggcgacctgctgctgcacctggaaaagaagcacggcgaggactggggaaaggtgtacgacgaggcctgggagcggattgacaagaaagtggaaggcctgagcaagcacatcaagctggaagaggaacggagaagcgaggacgcccagagcaaggccgccctgaccgactggctgcgggctaaggccagcttcgtgatcgagggcctgaaggaggccgacaaggacgagttctgcagatgcgagctgaagctgcagaagtggtacggggacctgcggggaaagcccttcgccatcgaagccgagaacagcatcctggacatcagcggcttcagcaagcagtacaactgtgccttcatctggcagaaggacggcgtgaagaagctgaacctgtacctgatcatcaactacttcaagggcggcaagctgcggttcaagaagatcaaacctgaagccttcgaagccaacagattctacaccgtgatcaacaaaaagagcggcgagatcgtgcccatggaggtgaacttcaacttcgacgaccccaacctgatcatcctgcctctggcctttggcaagagacagggcagagaattcatctggaacgacctgctgtccctggaaaccggcagcctgaagctggccaacggaagagtgatcgagaagacactgtacaacagaagaacccggcaggatgagcctgccctgttcgtggccctgaccttcgagcggcgggaggtcctggactcctccaatatcaaaccaatgaacctgatcggcgtggcaagaggcgaaaacatccccgccgtgatcgccctgaccgaccccgagggctgcccactgagccggtttaaggatagcctgggaaacccaacccacatcctgagaatcggcgagagctataaggagaagcagcggaccatccaggccaagaaggaggtggagcagcggagagccggcggctacagccggaagtacgccagcaaagccaagaatctggcagacgatatggtgagaaacaccgctagagatctgctgtactacgccgtgacccaggatgccatgctgatcttcgccaacctgagccggggcttcggccggcagggcaagcggaccttcatggccgagagacagtacacacggatggaggactggctgaccgccaagctggcctacgagggcctgagcaagacctacctgtccaagacactggcccagtacacctccaagacatgcagcaactgtgggtttaccatcaccagcgccgactacgacagggtgctggagaagctgaagaagacagcaacaggctggatgaccacaattaacggcaaggagctgaaggtggagggccagattacctactacaacagatacaagagacagaacgtagtcaaggacctgtccgtcgagctggatagactgagcgaagaatctgtgaacaacgacatctcctcctggacaaagggcagaagcggagaagctctgagcctcctgaagaaaagattctcccatagacccgtgcaggagaagttcgtgtgcctgaactgcggcttcgagacacacgcagccgagcaagccgccctgaacatcgccagatcctggctgttcctgcggagccaggagtacaagaaataccagacaaacaagacaaccggcaacaccgataagagagccttcgtcgagacctggcagtccttttaccggaagaagcttaaggaggtgtggaaacctgccgtgcggtctggcggatctggcggaggctccgagatgggcctgctgacattcagagacatcgctatcgagttcagcctggaggaatggcaatgtctggactgcgcccagagaaatctgtacagagatgtgatgctggaaaactaccggaacctggtgtctctgggcatcgccgtgtccaagcccgacctgatcacctgcctcgagcagaacaaggaaagccagaacatcaagcggaacaaaatggtcgccaagcaccctgtgatgcacagccacggcggcccaagcagcggcgcccctcctcccagcggcggcagcccagccggctccccaacctctaccgaggagggcacctctgagtccgccacccccgagagcggccctggcacctccaccgagcccagcgagggcagcgcacccggcagccctgccggcagccccacctccacagaggagggaaccagcaccgagcccagcgaaggcagcgccccaggcaccagcaccgagcctagtgagcaggagattaaacggatcaacaagatcagaagaagacttgtgaaagacagcaacaccaagaaggccggcaagacaggccccatgaaaaccctgctggttagagtgatgacacccgatctgagagagcggctggaaaacctgagaaagaagcctgaaaatatcccccagcccatcagcaatacatctagagccaacctgaataagctgctgaccgattacaccgaaatgaagaaggcgatcctgcatgtgtactgggaagagttccagaaggaccctgtgggcctgatgagccgggtggcccagcctgccagcaagaagatcgatcagaacaagctgaaacctgagatggacgagaagggcaacctgaccaccgccggctttgcctgctctcagtgtggccagcccctgttcgtgtacaagctggagcaggtgtctgagaagggcaaggcttacaccaactacttcggacggtgcaatgtggccgagcacgaaaagctgatcctgctggcccagctgaagcccgagaaggatagcgacgaagccgtgacatatagcctgggaaagtttgggcagagggccctggatttctacagcattcatgtgaccaaggagtccacccaccccgtgaagcccctggcccagatcgccggaaacagatacgcctccggacctgtgggaaaggccctgagcgacgcatgtatgggcacaatcgcctccttcctgtctaagtaccaggacatcatcatcgaacaccagaaggtggtgaagggcaaccagaagagactggagagcctgcgggagctggccggcaaggaaaacctggaataccctagcgtgaccctgccacctcagcctcacaccaaggagggcgttgatgcctacaacgaagtgatcgcccgggtgcgaatgtgggtgaacctgaacctgtggcagaagctgaagctaagcagagatgatgccaagcctctgctgagactgaagggattcccttcctttcctctggtcgagagacaggccaacgaagtggactggtgggacatggtgtgtaacgtgaagaagctgatcaacgagaaaaaggaggatggcaaggtgttttggcagaatctggctggctacaagagacaggaagccctgagaccatacctgagcagcgaggaagatcggaagaagggaaagaaattcgctcggtaccagctgggcgacctgctgctgcacctggaaaagaagcacggcgaggactggggaaaggtgtacgacgaggcctgggagcggattgacaagaaagtggaaggcctgagcaagcacatcaagctggaagaggaacggagaagcgaggacgcccagagcaaggccgccctgaccgactggctgcgggctaaggccagcttcgtgatcgagggcctgaaggaggccgacaaggacgagttctgcagatgcgagctgaagctgcagaagtggtacggggacctgcggggaaagcccttcgccatcgaagccgagaacagcatcctggacatcagcggcttcagcaagcagtacaactgtgccttcatctggcagaaggacggcgtgaagaagctgaacctgtacctgatcatcaactacttcaagggcggcaagctgcggttcaagaagatcaaacctgaagccttcgaagccaacagattctacaccgtgatcaacaaaaagagcggcgagatcgtgcccatggaggtgaacttcaacttcgacgaccccaacctgatcatcctgcctctggcctttggcaagagacagggcagagaattcatctggaacgacctgctgtccctggaaaccggcagcctgaagctggccaacggaagagtgatcgagaagacactgtacaacagaagaacccggcaggatgagcctgccctgttcgtggccctgaccttcgagcggcgggaggtcctggactcctccaatatcaaaccaatgaacctgatcggcgtggcaagaggcgaaaacatccccgccgtgatcgccctgaccgaccccgagggctgcccactgagccggtttaaggatagcctgggaaacccaacccacatcctgagaatcggcgagagctataaggagaagcagcggaccatccaggccaagaaggaggtggagcagcggagagccggcggctacagccggaagtacgccagcaaagccaagaatctggcagacgatatggtgagaaacaccgctagagatctgctgtactacgccgtgacccaggatgccatgctgatcttcgccaacctgagccggggcttcggccggcagggcaagcggaccttcatggccgagagacagtacacacggatggaggactggctgaccgccaagctggcctacgagggcctgagcaagacctacctgtccaagacactggcccagtacacctccaagacatgcagcaactgtgggtttaccatcaccagcgccgactacgacagggtgctggagaagctgaagaagacagcaacaggctggatgaccacaattaacggcaaggagctgaaggtggagggccagattacctactacaacagatacaagagacagaacgtagtcaaggacctgtccgtcgagctggatagactgagcgaagaatctgtgaacaacgacatctcctcctggacaaagggcagaagcggagaagctctgagcctcctgaagaaaagattctcccatagacccgtgcaggagaagttcgtgtgcctgaactgcggcttcgagacacacgcagccgagcaagccgccctgaacatcgccagatcctggctgttcctgcggagccaggagtacaagaaataccagacaaacaagacaaccggcaacaccgataagagagccttcgtcgagacctggcagtccttttaccggaagaagcttaaggaggtgtggaaacctgccgtgcggtctggcggatctggcggaggctcctgtcgccttccgggacgtgatcgtggacttcacccaggaggaatggcagcagctgaagcctgctcaaaaggacctgtacagagatgtgatgatggaaatctactggaatctggtgtctctggacctggaaaccgagggagatatgaacgagcctgaccccgagaaagacagctgggaggatagaacaagcatcgtggttgtggaaggcctgatgcggaacggcgcccagggctacgcctgcgagaaggccggcatccagggctgtagagtgggatctggctccggcagcggccccaagaaaaagagaaaagtctaagctgccttctgcggggcttgccttctggccatgcccttcttctctcccttgcacctgtacctcttggtctttgaataaagcctgagtaggaaggctagcaaaaaaaaaaaaaaaaaaaaaaaaaaaaaaaaaaaaaaaaaaaaaaaaaaaaaaaaaaaaaaaaaaaaaaaaaaaaaaaa

SEQ ID NO: 18552 - RNA, 9494 nt, synthetic construct
  source 1..9494: mol_type = other RNA
aggaaataagagagaaaagaagagtaagaagaaatataagagccaccatggcccctaagaagaagcgtaaagtgagccggatggaacgcctcgtctacgaggtgcggcagaagtgcagaaacatcgaggacatctgcatctcctgcggatctctgaacgtgaccctggagcacccactgttcatcggcggcatgtgccagaactgtaaaaactgttttctggagtgtgcctatcaatacgacgatgacggctaccagagctactgcaccatctgttgcggcggaagagaggtgctgatgtgtggaaataacaactgctgccggtgcttctgcgtggaatgcgtggacctgctggtgggccccggcgccgcccaggccgctattaaggaagatccttggaactgctacatgtgcggccacaagggcacatacggcctgctgagacggagagaggactggcctagcagactgcagatgttcttcgccaataaccacgaccaggagttcgacccccctaaggtgtaccctcccgtccccgccgagaagagaaagcccatccgggtcctgagcctgttcgatggcatcgccaccggtctgctggtgctgaaggacctgggcatccaggtggataggtacattgcctccgaggtgtgcgaggactccatcaccgtgggaatggtgcgtcatcagggcaagatcatgtacgtgggcgacgtgcggagcgtgacacagaagcatatccaggagtggggccctttcgacctggtgatcggcggcagcccttgcaatgacctgagcatcgtgaacccagcccggaagggcctgtacgagggaaccggcagactgttcttcgagttttacagactgctgcacgacgcccggcctaaggaaggcgacgaccggcccttcttttggctgttcgagaatgtggtggccatgggagtcagcgacaagcgggatattagccggttcctggagagcaaccccgtgatgatcgatgccaaggaagtgagcgccgcccaccgggccagatacttctggggcaatctgcctggcatgaacagacccctggccagcaccgtgaacgacaagctggagctgcaggagtgcctggagcacggccggatcgccaagttcagcaaggtgagaaccatcaccacccgaagcaacagcatcaaacaaggcaaggaccagcactttcctgtgttcatgaacgagaaggaggacatcctgtggtgtaccgagatggagagagtgttcgggttcccagtccactacacagatgtcagcaacatgtctagactggccagacagagactgctgggaagaagctggtccgtccctgtgatcagacacctgttcgcccctctgaaggagtacttcgcctgcgtgagcagcggcaacagcaacgccaacagccggggccccagcttctctagcggcctggtgccactgtccctgagagggagccacatgggccccatggagatctacaaaaccgtgagcgcctggaagcggcagcctgtgcgcgtgctgagcctgtttcggaatatcgataaagtcctgaaaagcctgggattcctggagagcggctctggctccggcggtggcaccctgaagtacgtggaggatgtgacaaacgtggtcagacgggatgtggagaagtggggccccttcgatctggtgtacggcagcacccaacccctgggcagctcttgtgaccggtgccctggctggtacatgtttcagttccaccggatcctgcagtacgccctgccgagacaggagtcccagcggccattcttttggattttcatggacaacttgctgctgaccgaggatgaccaggaaactaccactcggttcctgcagaccgaagccgtgaccctgcaggacgtgagaggccgggactaccagaacgccatgcgggtgtggtccaacatccctggactgaaaagcaagcacgcacctctgacccctaaagaagaggagtacctgcaggcccaggtgcggagcagaagcaagctggacgcccctaaggtggatctgctggtgaagaattgcctcctgcccctgagagagtacttcaagtatttcagccagaatagtctgcccctgggaggcagcggcggcggcgccctggtgacatttgaggacgtcgccgtgcggttcacccaggaggaatgggctctgctggatccttctcagaaaatcctgtaccgggacgtgatgagagagacataccggaatctgacctccgtgggcatcaactgggaatgttgggaccttgaagcctgcttcagaagcctgggaagaaacctgagagtgcaggtggtgaagagaaagtgcgagctgaccaacagcggcccctgcgccgagggcggcccaagcagcggcgcccctcctcccagcggcggcagcccagccggctccccaacctctaccgaggagggcacctctgagtccgccacccccgagagcggccctggcacctccaccgagcccagcgagggcagcgcacccggcagccctgccggcagccccacctccacagaggagggaaccagcaccgagcccagcgaaggcagcgccccaggcaccagcaccgagcctagtgagcaggagattaaacggatcaacaagatcagaagaagacttgtgaaagacagcaacaccaagaaggccggcaagacaggccccatgaaaaccctgctggttagagtgatgacacccgatctgagagagcggctggaaaacctgagaaagaagcctgaaaatatcccccagcccatcagcaatacatctagagccaacctgaataagctgctgaccgattacaccgaaatgaagaaggcgatcctgcatgtgtactgggaagagttccagaaggaccctgtgggcctgatgagccgggtggcccagcctgccagcaagaagatcgatcagaacaagctgaaacctgagatggacgagaagggcaacctgaccaccgccggctttgcctgctctcagtgtggccagcccctgttcgtgtacaagctggagcaggtgtctgagaagggcaaggcttacaccaactacttcggacggtgcaatgtggccgagcacgaaaagctgatcctgctggcccagctgaagcccgagaaggatagcgacgaagccgtgacatatagcctgggaaagtttgggcagagggccctggatttctacagcattcatgtgaccaaggagtccacccaccccgtgaagcccctggcccagatcgccggaaacagatacgcctccggacctgtgggaaaggccctgagcgacgcatgtatgggcacaatcgcctccttcctgtctaagtaccaggacatcatcatcgaacaccagaaggtggtgaagggcaaccagaagagactggagagcctgcgggagctggccggcaaggaaaacctggaataccctagcgtgaccctgccacctcagcctcacaccaaggagggcgttgatgcctacaacgaagtgatcgcccgggtgcgaatgtgggtgaacctgaacctgtggcagaagctgaagctaagcagagatgatgccaagcctctgctgagactgaagggattcccttcctttcctctggtcgagagacaggccaacgaagtggactggtgggacatggtgtgtaacgtgaagaagctgatcaacgagaaaaaggaggatggcaaggtgttttggcagaatctggctggctacaagagacaggaagccctgagaccatacctgagcagcgaggaagatcggaagaagggaaagaaattcgctcggtaccagctgggcgacctgctgctgcacctggaaaagaagcacggcgaggactggggaaaggtgtacgacgaggcctgggagcggattgacaagaaagtggaaggcctgagcaagcacatcaagctggaagaggaacggagaagcgaggacgcccagagcaaggccgccctgaccgactggctgcgggctaaggccagcttcgtgatcgagggcctgaaggaggccgacaaggacgagttctgcagatgcgagctgaagctgcagaagtggtacggggacctgcggggaaagcccttcgccatcgaagccgagaacagcatcctggacatcagcggcttcagcaagcagtacaactgtgccttcatctggcagaaggacggcgtgaagaagctgaacctgtacctgatcatcaactacttcaagggcggcaagctgcggttcaagaagatcaaacctgaagccttcgaagccaacagattctacaccgtgatcaacaaaaagagcggcgagatcgtgcccatggaggtgaacttcaacttcgacgaccccaacctgatcatcctgcctctggcctttggcaagagacagggcagagaattcatctggaacgacctgctgtccctggaaaccggcagcctgaagctggccaacggaagagtgatcgagaagacactgtacaacagaagaacccggcaggatgagcctgccctgttcgtggccctgaccttcgagcggcgggaggtcctggactcctccaatatcaaaccaatgaacctgatcggcgtggcaagaggcgaaaacatccccgccgtgatcgccctgaccgaccccgagggctgcccactgagccggtttaaggatagcctgggaaacccaacccacatcctgagaatcggcgagagctataaggagaagcagcggaccatccaggccaagaaggaggtggagcagcggagagccggcggctacagccggaagtacgccagcaaagccaagaatctggcagacgatatggtgagaaacaccgctagagatctgctgtactacgccgtgacccaggatgccatgctgatcttcgccaacctgagccggggcttcggccggcagggcaagcggaccttcatggccgagagacagtacacacggatggaggactggctgaccgccaagctggcctacgagggcctgagcaagacctacctgtccaagacactggcccagtacacctccaagacatgcagcaactgtgggtttaccatcaccagcgccgactacgacagggtgctggagaagctgaagaagacagcaacaggctggatgaccacaattaacggcaaggagctgaaggtggagggccagattacctactacaacagatacaagagacagaacgtagtcaaggacctgtccgtcgagctggatagactgagcgaagaatctgtgaacaacgacatctcctcctggacaaagggcagaagcggagaagctctgagcctcctgaagaaaagattctcccatagacccgtgcaggagaagttcgtgtgcctgaactgcggcttcgagacacacgcagccgagcaagccgccctgaacatcgccagatcctggctgttcctgcggagccaggagtacaagaaataccagacaaacaagacaaccggcaacaccgataagagagccttcgtcgagacctggcagtccttttaccggaagaagcttaaggaggtgtggaaacctgccgtgcggtctggcggatctggcggaggctccgagatgggcctgctgacattcagagacatcgctatcgagttcagcctggaggaatggcaatgtctggactgcgcccagagaaatctgtacagagatgtgatgctggaaaactaccggaacctggtgtctctgggcatcgccgtgtccaagcccgacctgatcacctgcctcgagcagaacaaggaaagccagaacatcaagcggaacaaaatggtcgccaagcaccctgtgatgcacagccacggcggcccaagcagcggcgcccctcctcccagcggcggcagcccagccggctccccaacctctaccgaggagggcacctctgagtccgccacccccgagagcggccctggcacctccaccgagcccagcgagggcagcgcacccggcagccctgccggcagccccacctccacagaggagggaaccagcaccgagcccagcgaaggcagcgccccaggcaccagcaccgagcctagtgagcaggagattaaacggatcaacaagatcagaagaagacttgtgaaagacagcaacaccaagaaggccggcaagacaggccccatgaaaaccctgctggttagagtgatgacacccgatctgagagagcggctggaaaacctgagaaagaagcctgaaaatatcccccagcccatcagcaatacatctagagccaacctgaataagctgctgaccgattacaccgaaatgaagaaggcgatcctgcatgtgtactgggaagagttccagaaggaccctgtgggcctgatgagccgggtggcccagcctgccagcaagaagatcgatcagaacaagctgaaacctgagatggacgagaagggcaacctgaccaccgccggctttgcctgctctcagtgtggccagcccctgttcgtgtacaagctggagcaggtgtctgagaagggcaaggcttacaccaactacttcggacggtgcaatgtggccgagcacgaaaagctgatcctgctggcccagctgaagcccgagaaggatagcgacgaagccgtgacatatagcctgggaaagtttgggcagagggccctggatttctacagcattcatgtgaccaaggagtccacccaccccgtgaagcccctggcccagatcgccggaaacagatacgcctccggacctgtgggaaaggccctgagcgacgcatgtatgggcacaatcgcctccttcctgtctaagtaccaggacatcatcatcgaacaccagaaggtggtgaagggcaaccagaagagactggagagcctgcgggagctggccggcaaggaaaacctggaataccctagcgtgaccctgccacctcagcctcacaccaaggagggcgttgatgcctacaacgaagtgatcgcccgggtgcgaatgtgggtgaacctgaacctgtggcagaagctgaagctaagcagagatgatgccaagcctctgctgagactgaagggattcccttcctttcctctggtcgagagacaggccaacgaagtggactggtgggacatggtgtgtaacgtgaagaagctgatcaacgagaaaaaggaggatggcaaggtgttttggcagaatctggctggctacaagagacaggaagccctgagaccatacctgagcagcgaggaagatcggaagaagggaaagaaattcgctcggtaccagctgggcgacctgctgctgcacctggaaaagaagcacggcgaggactggggaaaggtgtacgacgaggcctgggagcggattgacaagaaagtggaaggcctgagcaagcacatcaagctggaagaggaacggagaagcgaggacgcccagagcaaggccgccctgaccgactggctgcgggctaaggccagcttcgtgatcgagggcctgaaggaggccgacaaggacgagttctgcagatgcgagctgaagctgcagaagtggtacggggacctgcggggaaagcccttcgccatcgaagccgagaacagcatcctggacatcagcggcttcagcaagcagtacaactgtgccttcatctggcagaaggacggcgtgaagaagctgaacctgtacctgatcatcaactacttcaagggcggcaagctgcggttcaagaagatcaaacctgaagccttcgaagccaacagattctacaccgtgatcaacaaaaagagcggcgagatcgtgcccatggaggtgaacttcaacttcgacgaccccaacctgatcatcctgcctctggcctttggcaagagacagggcagagaattcatctggaacgacctgctgtccctggaaaccggcagcctgaagctggccaacggaagagtgatcgagaagacactgtacaacagaagaacccggcaggatgagcctgccctgttcgtggccctgaccttcgagcggcgggaggtcctggactcctccaatatcaaaccaatgaacctgatcggcgtggcaagaggcgaaaacatccccgccgtgatcgccctgaccgaccccgagggctgcccactgagccggtttaaggatagcctgggaaacccaacccacatcctgagaatcggcgagagctataaggagaagcagcggaccatccaggccaagaaggaggtggagcagcggagagccggcggctacagccggaagtacgccagcaaagccaagaatctggcagacgatatggtgagaaacaccgctagagatctgctgtactacgccgtgacccaggatgccatgctgatcttcgccaacctgagccggggcttcggccggcagggcaagcggaccttcatggccgagagacagtacacacggatggaggactggctgaccgccaagctggcctacgagggcctgagcaagacctacctgtccaagacactggcccagtacacctccaagacatgcagcaactgtgggtttaccatcaccagcgccgactacgacagggtgctggagaagctgaagaagacagcaacaggctggatgaccacaattaacggcaaggagctgaaggtggagggccagattacctactacaacagatacaagagacagaacgtagtcaaggacctgtccgtcgagctggatagactgagcgaagaatctgtgaacaacgacatctcctcctggacaaagggcagaagcggagaagctctgagcctcctgaagaaaagattctcccatagacccgtgcaggagaagttcgtgtgcctgaactgcggcttcgagacacacgcagccgagcaagccgccctgaacatcgccagatcctggctgttcctgcggagccaggagtacaagaaataccagacaaacaagacaaccggcaacaccgataagagagccttcgtcgagacctggcagtccttttaccggaagaagcttaaggaggtgtggaaacctgccgtgcggtctggcggatctggcggaggctcctgtgacctacaacgacgtgcacgtggacatcacccaggaggaatgggctctgatggaccccagccagcggaacctgtacaaggatgtgatggtcgagacatacatgaacctgaccgccatcggatataattgggagaacctggaagtggaagaaccatgtcagaaccccctgaagcacggcagacacgagagacctcatacaggcgagaaaccttacgagtacaatcagtgcggcaaggccttcgcccaacctggatctggctccggcagcggccccaagaaaaagagaaaagtctaagctgccttctgcggggcttgccttctggccatgcccttcttctctcccttgcacctgtacctcttggtctttgaataaagcctgagtaggaaggctagcaaaaaaaaaaaaaaaaaaaaaaaaaaaaaaaaaaaaaaaaaaaaaaaaaaaaaaaaaaaaaaaaaaaaaaaaaaaaaaaa

SEQ ID NO: 18553 - RNA, 9485 nt, synthetic construct
  source 1..9485: mol_type = other RNA
aggaaataagagagaaaagaagagtaagaagaaatataagagccaccatggcccctaagaagaagcgtaaagtgagccggatggaacgcctcgtctacgaggtgcggcagaagtgcagaaacatcgaggacatctgcatctcctgcggatctctgaacgtgaccctggagcacccactgttcatcggcggcatgtgccagaactgtaaaaactgttttctggagtgtgcctatcaatacgacgatgacggctaccagagctactgcaccatctgttgcggcggaagagaggtgctgatgtgtggaaataacaactgctgccggtgcttctgcgtggaatgcgtggacctgctggtgggccccggcgccgcccaggccgctattaaggaagatccttggaactgctacatgtgcggccacaagggcacatacggcctgctgagacggagagaggactggcctagcagactgcagatgttcttcgccaataaccacgaccaggagttcgacccccctaaggtgtaccctcccgtccccgccgagaagagaaagcccatccgggtcctgagcctgttcgatggcatcgccaccggtctgctggtgctgaaggacctgggcatccaggtggataggtacattgcctccgaggtgtgcgaggactccatcaccgtgggaatggtgcgtcatcagggcaagatcatgtacgtgggcgacgtgcggagcgtgacacagaagcatatccaggagtggggccctttcgacctggtgatcggcggcagcccttgcaatgacctgagcatcgtgaacccagcccggaagggcctgtacgagggaaccggcagactgttcttcgagttttacagactgctgcacgacgcccggcctaaggaaggcgacgaccggcccttcttttggctgttcgagaatgtggtggccatgggagtcagcgacaagcgggatattagccggttcctggagagcaaccccgtgatgatcgatgccaaggaagtgagcgccgcccaccgggccagatacttctggggcaatctgcctggcatgaacagacccctggccagcaccgtgaacgacaagctggagctgcaggagtgcctggagcacggccggatcgccaagttcagcaaggtgagaaccatcaccacccgaagcaacagcatcaaacaaggcaaggaccagcactttcctgtgttcatgaacgagaaggaggacatcctgtggtgtaccgagatggagagagtgttcgggttcccagtccactacacagatgtcagcaacatgtctagactggccagacagagactgctgggaagaagctggtccgtccctgtgatcagacacctgttcgcccctctgaaggagtacttcgcctgcgtgagcagcggcaacagcaacgccaacagccggggccccagcttctctagcggcctggtgccactgtccctgagagggagccacatgggccccatggagatctacaaaaccgtgagcgcctggaagcggcagcctgtgcgcgtgctgagcctgtttcggaatatcgataaagtcctgaaaagcctgggattcctggagagcggctctggctccggcggtggcaccctgaagtacgtggaggatgtgacaaacgtggtcagacgggatgtggagaagtggggccccttcgatctggtgtacggcagcacccaacccctgggcagctcttgtgaccggtgccctggctggtacatgtttcagttccaccggatcctgcagtacgccctgccgagacaggagtcccagcggccattcttttggattttcatggacaacttgctgctgaccgaggatgaccaggaaactaccactcggttcctgcagaccgaagccgtgaccctgcaggacgtgagaggccgggactaccagaacgccatgcgggtgtggtccaacatccctggactgaaaagcaagcacgcacctctgacccctaaagaagaggagtacctgcaggcccaggtgcggagcagaagcaagctggacgcccctaaggtggatctgctggtgaagaattgcctcctgcccctgagagagtacttcaagtatttcagccagaatagtctgcccctgggaggcagcggcggcggcgccctggtgacatttgaggacgtcgccgtgcggttcacccaggaggaatgggctctgctggatccttctcagaaaatcctgtaccgggacgtgatgagagagacataccggaatctgacctccgtgggcatcaactgggaatgttgggaccttgaagcctgcttcagaagcctgggaagaaacctgagagtgcaggtggtgaagagaaagtgcgagctgaccaacagcggcccctgcgccgagggcggcccaagcagcggcgcccctcctcccagcggcggcagcccagccggctccccaacctctaccgaggagggcacctctgagtccgccacccccgagagcggccctggcacctccaccgagcccagcgagggcagcgcacccggcagccctgccggcagccccacctccacagaggagggaaccagcaccgagcccagcgaaggcagcgccccaggcaccagcaccgagcctagtgagcaggagattaaacggatcaacaagatcagaagaagacttgtgaaagacagcaacaccaagaaggccggcaagacaggccccatgaaaaccctgctggttagagtgatgacacccgatctgagagagcggctggaaaacctgagaaagaagcctgaaaatatcccccagcccatcagcaatacatctagagccaacctgaataagctgctgaccgattacaccgaaatgaagaaggcgatcctgcatgtgtactgggaagagttccagaaggaccctgtgggcctgatgagccgggtggcccagcctgccagcaagaagatcgatcagaacaagctgaaacctgagatggacgagaagggcaacctgaccaccgccggctttgcctgctctcagtgtggccagcccctgttcgtgtacaagctggagcaggtgtctgagaagggcaaggcttacaccaactacttcggacggtgcaatgtggccgagcacgaaaagctgatcctgctggcccagctgaagcccgagaaggatagcgacgaagccgtgacatatagcctgggaaagtttgggcagagggccctggatttctacagcattcatgtgaccaaggagtccacccaccccgtgaagcccctggcccagatcgccggaaacagatacgcctccggacctgtgggaaaggccctgagcgacgcatgtatgggcacaatcgcctccttcctgtctaagtaccaggacatcatcatcgaacaccagaaggtggtgaagggcaaccagaagagactggagagcctgcgggagctggccggcaaggaaaacctggaataccctagcgtgaccctgccacctcagcctcacaccaaggagggcgttgatgcctacaacgaagtgatcgcccgggtgcgaatgtgggtgaacctgaacctgtggcagaagctgaagctaagcagagatgatgccaagcctctgctgagactgaagggattcccttcctttcctctggtcgagagacaggccaacgaagtggactggtgggacatggtgtgtaacgtgaagaagctgatcaacgagaaaaaggaggatggcaaggtgttttggcagaatctggctggctacaagagacaggaagccctgagaccatacctgagcagcgaggaagatcggaagaagggaaagaaattcgctcggtaccagctgggcgacctgctgctgcacctggaaaagaagcacggcgaggactggggaaaggtgtacgacgaggcctgggagcggattgacaagaaagtggaaggcctgagcaagcacatcaagctggaagaggaacggagaagcgaggacgcccagagcaaggccgccctgaccgactggctgcgggctaaggccagcttcgtgatcgagggcctgaaggaggccgacaaggacgagttctgcagatgcgagctgaagctgcagaagtggtacggggacctgcggggaaagcccttcgccatcgaagccgagaacagcatcctggacatcagcggcttcagcaagcagtacaactgtgccttcatctggcagaaggacggcgtgaagaagctgaacctgtacctgatcatcaactacttcaagggcggcaagctgcggttcaagaagatcaaacctgaagccttcgaagccaacagattctacaccgtgatcaacaaaaagagcggcgagatcgtgcccatggaggtgaacttcaacttcgacgaccccaacctgatcatcctgcctctggcctttggcaagagacagggcagagaattcatctggaacgacctgctgtccctggaaaccggcagcctgaagctggccaacggaagagtgatcgagaagacactgtacaacagaagaacccggcaggatgagcctgccctgttcgtggccctgaccttcgagcggcgggaggtcctggactcctccaatatcaaaccaatgaacctgatcggcgtggcaagaggcgaaaacatccccgccgtgatcgccctgaccgaccccgagggctgcccactgagccggtttaaggatagcctgggaaacccaacccacatcctgagaatcggcgagagctataaggagaagcagcggaccatccaggccaagaaggaggtggagcagcggagagccggcggctacagccggaagtacgccagcaaagccaagaatctggcagacgatatggtgagaaacaccgctagagatctgctgtactacgccgtgacccaggatgccatgctgatcttcgccaacctgagccggggcttcggccggcagggcaagcggaccttcatggccgagagacagtacacacggatggaggactggctgaccgccaagctggcctacgagggcctgagcaagacctacctgtccaagacactggcccagtacacctccaagacatgcagcaactgtgggtttaccatcaccagcgccgactacgacagggtgctggagaagctgaagaagacagcaacaggctggatgaccacaattaacggcaaggagctgaaggtggagggccagattacctactacaacagatacaagagacagaacgtagtcaaggacctgtccgtcgagctggatagactgagcgaagaatctgtgaacaacgacatctcctcctggacaaagggcagaagcggagaagctctgagcctcctgaagaaaagattctcccatagacccgtgcaggagaagttcgtgtgcctgaactgcggcttcgagacacacgcagccgagcaagccgccctgaacatcgccagatcctggctgttcctgcggagccaggagtacaagaaataccagacaaacaagacaaccggcaacaccgataagagagccttcgtcgagacctggcagtccttttaccggaagaagcttaaggaggtgtggaaacctgccgtgcggtctggcggatctggcggaggctccgagatgggcctgctgacattcagagacatcgctatcgagttcagcctggaggaatggcaatgtctggactgcgcccagagaaatctgtacagagatgtgatgctggaaaactaccggaacctggtgtctctgggcatcgccgtgtccaagcccgacctgatcacctgcctcgagcagaacaaggaaagccagaacatcaagcggaacaaaatggtcgccaagcaccctgtgatgcacagccacggcggcccaagcagcggcgcccctcctcccagcggcggcagcccagccggctccccaacctctaccgaggagggcacctctgagtccgccacccccgagagcggccctggcacctccaccgagcccagcgagggcagcgcacccggcagccctgccggcagccccacctccacagaggagggaaccagcaccgagcccagcgaaggcagcgccccaggcaccagcaccgagcctagtgagcaggagattaaacggatcaacaagatcagaagaagacttgtgaaagacagcaacaccaagaaggccggcaagacaggccccatgaaaaccctgctggttagagtgatgacacccgatctgagagagcggctggaaaacctgagaaagaagcctgaaaatatcccccagcccatcagcaatacatctagagccaacctgaataagctgctgaccgattacaccgaaatgaagaaggcgatcctgcatgtgtactgggaagagttccagaaggaccctgtgggcctgatgagccgggtggcccagcctgccagcaagaagatcgatcagaacaagctgaaacctgagatggacgagaagggcaacctgaccaccgccggctttgcctgctctcagtgtggccagcccctgttcgtgtacaagctggagcaggtgtctgagaagggcaaggcttacaccaactacttcggacggtgcaatgtggccgagcacgaaaagctgatcctgctggcccagctgaagcccgagaaggatagcgacgaagccgtgacatatagcctgggaaagtttgggcagagggccctggatttctacagcattcatgtgaccaaggagtccacccaccccgtgaagcccctggcccagatcgccggaaacagatacgcctccggacctgtgggaaaggccctgagcgacgcatgtatgggcacaatcgcctccttcctgtctaagtaccaggacatcatcatcgaacaccagaaggtggtgaagggcaaccagaagagactggagagcctgcgggagctggccggcaaggaaaacctggaataccctagcgtgaccctgccacctcagcctcacaccaaggagggcgttgatgcctacaacgaagtgatcgcccgggtgcgaatgtgggtgaacctgaacctgtggcagaagctgaagctaagcagagatgatgccaagcctctgctgagactgaagggattcccttcctttcctctggtcgagagacaggccaacgaagtggactggtgggacatggtgtgtaacgtgaagaagctgatcaacgagaaaaaggaggatggcaaggtgttttggcagaatctggctggctacaagagacaggaagccctgagaccatacctgagcagcgaggaagatcggaagaagggaaagaaattcgctcggtaccagctgggcgacctgctgctgcacctggaaaagaagcacggcgaggactggggaaaggtgtacgacgaggcctgggagcggattgacaagaaagtggaaggcctgagcaagcacatcaagctggaagaggaacggagaagcgaggacgcccagagcaaggccgccctgaccgactggctgcgggctaaggccagcttcgtgatcgagggcctgaaggaggccgacaaggacgagttctgcagatgcgagctgaagctgcagaagtggtacggggacctgcggggaaagcccttcgccatcgaagccgagaacagcatcctggacatcagcggcttcagcaagcagtacaactgtgccttcatctggcagaaggacggcgtgaagaagctgaacctgtacctgatcatcaactacttcaagggcggcaagctgcggttcaagaagatcaaacctgaagccttcgaagccaacagattctacaccgtgatcaacaaaaagagcggcgagatcgtgcccatggaggtgaacttcaacttcgacgaccccaacctgatcatcctgcctctggcctttggcaagagacagggcagagaattcatctggaacgacctgctgtccctggaaaccggcagcctgaagctggccaacggaagagtgatcgagaagacactgtacaacagaagaacccggcaggatgagcctgccctgttcgtggccctgaccttcgagcggcgggaggtcctggactcctccaatatcaaaccaatgaacctgatcggcgtggcaagaggcgaaaacatccccgccgtgatcgccctgaccgaccccgagggctgcccactgagccggtttaaggatagcctgggaaacccaacccacatcctgagaatcggcgagagctataaggagaagcagcggaccatccaggccaagaaggaggtggagcagcggagagccggcggctacagccggaagtacgccagcaaagccaagaatctggcagacgatatggtgagaaacaccgctagagatctgctgtactacgccgtgacccaggatgccatgctgatcttcgccaacctgagccggggcttcggccggcagggcaagcggaccttcatggccgagagacagtacacacggatggaggactggctgaccgccaagctggcctacgagggcctgagcaagacctacctgtccaagacactggcccagtacacctccaagacatgcagcaactgtgggtttaccatcaccagcgccgactacgacagggtgctggagaagctgaagaagacagcaacaggctggatgaccacaattaacggcaaggagctgaaggtggagggccagattacctactacaacagatacaagagacagaacgtagtcaaggacctgtccgtcgagctggatagactgagcgaagaatctgtgaacaacgacatctcctcctggacaaagggcagaagcggagaagctctgagcctcctgaagaaaagattctcccatagacccgtgcaggagaagttcgtgtgcctgaactgcggcttcgagacacacgcagccgagcaagccgccctgaacatcgccagatcctggctgttcctgcggagccaggagtacaagaaataccagacaaacaagacaaccggcaacaccgataagagagccttcgtcgagacctggcagtccttttaccggaagaagcttaaggaggtgtggaaacctgccgtgcggtctggcggatctggcggaggctccttctcaggagagcgtggccttcgaggacgtggccgtctacttcaccaccaaagagtgggccatcatggtgcccgccgagagagccctgtacagagatgtgatgctggaaaactacgaggccgtggcttttgtggccgtgcctcctacaagcaagcccgctctggtgtcccacctggaacagggcaaggaaagctgcttcatccggcctccaggcgtgctgagcagaagcgactggcgggccggaggatctggctccggcagcggccccaagaaaaagagaaaagtctaagctgccttctgcggggcttgccttctggccatgcccttcttctctcccttgcacctgtacctcttggtctttgaataaagcctgagtaggaaggctagcaaaaaaaaaaaaaaaaaaaaaaaaaaaaaaaaaaaaaaaaaaaaaaaaaaaaaaaaaaaaaaaaaaaaaaaaaaaaaaaa

SEQ ID NO: 18554 - RNA, 9485 nt, synthetic construct
  source 1..9485: mol_type = other RNA
aggaaataagagagaaaagaagagtaagaagaaatataagagccaccatggcccctaagaagaagcgtaaagtgagccggatggaacgcctcgtctacgaggtgcggcagaagtgcagaaacatcgaggacatctgcatctcctgcggatctctgaacgtgaccctggagcacccactgttcatcggcggcatgtgccagaactgtaaaaactgttttctggagtgtgcctatcaatacgacgatgacggctaccagagctactgcaccatctgttgcggcggaagagaggtgctgatgtgtggaaataacaactgctgccggtgcttctgcgtggaatgcgtggacctgctggtgggccccggcgccgcccaggccgctattaaggaagatccttggaactgctacatgtgcggccacaagggcacatacggcctgctgagacggagagaggactggcctagcagactgcagatgttcttcgccaataaccacgaccaggagttcgacccccctaaggtgtaccctcccgtccccgccgagaagagaaagcccatccgggtcctgagcctgttcgatggcatcgccaccggtctgctggtgctgaaggacctgggcatccaggtggataggtacattgcctccgaggtgtgcgaggactccatcaccgtgggaatggtgcgtcatcagggcaagatcatgtacgtgggcgacgtgcggagcgtgacacagaagcatatccaggagtggggccctttcgacctggtgatcggcggcagcccttgcaatgacctgagcatcgtgaacccagcccggaagggcctgtacgagggaaccggcagactgttcttcgagttttacagactgctgcacgacgcccggcctaaggaaggcgacgaccggcccttcttttggctgttcgagaatgtggtggccatgggagtcagcgacaagcgggatattagccggttcctggagagcaaccccgtgatgatcgatgccaaggaagtgagcgccgcccaccgggccagatacttctggggcaatctgcctggcatgaacagacccctggccagcaccgtgaacgacaagctggagctgcaggagtgcctggagcacggccggatcgccaagttcagcaaggtgagaaccatcaccacccgaagcaacagcatcaaacaaggcaaggaccagcactttcctgtgttcatgaacgagaaggaggacatcctgtggtgtaccgagatggagagagtgttcgggttcccagtccactacacagatgtcagcaacatgtctagactggccagacagagactgctgggaagaagctggtccgtccctgtgatcagacacctgttcgcccctctgaaggagtacttcgcctgcgtgagcagcggcaacagcaacgccaacagccggggccccagcttctctagcggcctggtgccactgtccctgagagggagccacatgggccccatggagatctacaaaaccgtgagcgcctggaagcggcagcctgtgcgcgtgctgagcctgtttcggaatatcgataaagtcctgaaaagcctgggattcctggagagcggctctggctccggcggtggcaccctgaagtacgtggaggatgtgacaaacgtggtcagacgggatgtggagaagtggggccccttcgatctggtgtacggcagcacccaacccctgggcagctcttgtgaccggtgccctggctggtacatgtttcagttccaccggatcctgcagtacgccctgccgagacaggagtcccagcggccattcttttggattttcatggacaacttgctgctgaccgaggatgaccaggaaactaccactcggttcctgcagaccgaagccgtgaccctgcaggacgtgagaggccgggactaccagaacgccatgcgggtgtggtccaacatccctggactgaaaagcaagcacgcacctctgacccctaaagaagaggagtacctgcaggcccaggtgcggagcagaagcaagctggacgcccctaaggtggatctgctggtgaagaattgcctcctgcccctgagagagtacttcaagtatttcagccagaatagtctgcccctgggaggcagcggcggcggcgccctggtgacatttgaggacgtcgccgtgcggttcacccaggaggaatgggctctgctggatccttctcagaaaatcctgtaccgggacgtgatgagagagacataccggaatctgacctccgtgggcatcaactgggaatgttgggaccttgaagcctgcttcagaagcctgggaagaaacctgagagtgcaggtggtgaagagaaagtgcgagctgaccaacagcggcccctgcgccgagggcggcccaagcagcggcgcccctcctcccagcggcggcagcccagccggctccccaacctctaccgaggagggcacctctgagtccgccacccccgagagcggccctggcacctccaccgagcccagcgagggcagcgcacccggcagccctgccggcagccccacctccacagaggagggaaccagcaccgagcccagcgaaggcagcgccccaggcaccagcaccgagcctagtgagcaggagattaaacggatcaacaagatcagaagaagacttgtgaaagacagcaacaccaagaaggccggcaagacaggccccatgaaaaccctgctggttagagtgatgacacccgatctgagagagcggctggaaaacctgagaaagaagcctgaaaatatcccccagcccatcagcaatacatctagagccaacctgaataagctgctgaccgattacaccgaaatgaagaaggcgatcctgcatgtgtactgggaagagttccagaaggaccctgtgggcctgatgagccgggtggcccagcctgccagcaagaagatcgatcagaacaagctgaaacctgagatggacgagaagggcaacctgaccaccgccggctttgcctgctctcagtgtggccagcccctgttcgtgtacaagctggagcaggtgtctgagaagggcaaggcttacaccaactacttcggacggtgcaatgtggccgagcacgaaaagctgatcctgctggcccagctgaagcccgagaaggatagcgacgaagccgtgacatatagcctgggaaagtttgggcagagggccctggatttctacagcattcatgtgaccaaggagtccacccaccccgtgaagcccctggcccagatcgccggaaacagatacgcctccggacctgtgggaaaggccctgagcgacgcatgtatgggcacaatcgcctccttcctgtctaagtaccaggacatcatcatcgaacaccagaaggtggtgaagggcaaccagaagagactggagagcctgcgggagctggccggcaaggaaaacctggaataccctagcgtgaccctgccacctcagcctcacaccaaggagggcgttgatgcctacaacgaagtgatcgcccgggtgcgaatgtgggtgaacctgaacctgtggcagaagctgaagctaagcagagatgatgccaagcctctgctgagactgaagggattcccttcctttcctctggtcgagagacaggccaacgaagtggactggtgggacatggtgtgtaacgtgaagaagctgatcaacgagaaaaaggaggatggcaaggtgttttggcagaatctggctggctacaagagacaggaagccctgagaccatacctgagcagcgaggaagatcggaagaagggaaagaaattcgctcggtaccagctgggcgacctgctgctgcacctggaaaagaagcacggcgaggactggggaaaggtgtacgacgaggcctgggagcggattgacaagaaagtggaaggcctgagcaagcacatcaagctggaagaggaacggagaagcgaggacgcccagagcaaggccgccctgaccgactggctgcgggctaaggccagcttcgtgatcgagggcctgaaggaggccgacaaggacgagttctgcagatgcgagctgaagctgcagaagtggtacggggacctgcggggaaagcccttcgccatcgaagccgagaacagcatcctggacatcagcggcttcagcaagcagtacaactgtgccttcatctggcagaaggacggcgtgaagaagctgaacctgtacctgatcatcaactacttcaagggcggcaagctgcggttcaagaagatcaaacctgaagccttcgaagccaacagattctacaccgtgatcaacaaaaagagcggcgagatcgtgcccatggaggtgaacttcaacttcgacgaccccaacctgatcatcctgcctctggcctttggcaagagacagggcagagaattcatctggaacgacctgctgtccctggaaaccggcagcctgaagctggccaacggaagagtgatcgagaagacactgtacaacagaagaacccggcaggatgagcctgccctgttcgtggccctgaccttcgagcggcgggaggtcctggactcctccaatatcaaaccaatgaacctgatcggcgtggcaagaggcgaaaacatccccgccgtgatcgccctgaccgaccccgagggctgcccactgagccggtttaaggatagcctgggaaacccaacccacatcctgagaatcggcgagagctataaggagaagcagcggaccatccaggccaagaaggaggtggagcagcggagagccggcggctacagccggaagtacgccagcaaagccaagaatctggcagacgatatggtgagaaacaccgctagagatctgctgtactacgccgtgacccaggatgccatgctgatcttcgccaacctgagccggggcttcggccggcagggcaagcggaccttcatggccgagagacagtacacacggatggaggactggctgaccgccaagctggcctacgagggcctgagcaagacctacctgtccaagacactggcccagtacacctccaagacatgcagcaactgtgggtttaccatcaccagcgccgactacgacagggtgctggagaagctgaagaagacagcaacaggctggatgaccacaattaacggcaaggagctgaaggtggagggccagattacctactacaacagatacaagagacagaacgtagtcaaggacctgtccgtcgagctggatagactgagcgaagaatctgtgaacaacgacatctcctcctggacaaagggcagaagcggagaagctctgagcctcctgaagaaaagattctcccatagacccgtgcaggagaagttcgtgtgcctgaactgcggcttcgagacacacgcagccgagcaagccgccctgaacatcgccagatcctggctgttcctgcggagccaggagtacaagaaataccagacaaacaagacaaccggcaacaccgataagagagccttcgtcgagacctggcagtccttttaccggaagaagcttaaggaggtgtggaaacctgccgtgcggtctggcggatctggcggaggctccgagatgggcctgctgacattcagagacatcgctatcgagttcagcctggaggaatggcaatgtctggactgcgcccagagaaatctgtacagagatgtgatgctggaaaactaccggaacctggtgtctctgggcatcgccgtgtccaagcccgacctgatcacctgcctcgagcagaacaaggaaagccagaacatcaagcggaacaaaatggtcgccaagcaccctgtgatgcacagccacggcggcccaagcagcggcgcccctcctcccagcggcggcagcccagccggctccccaacctctaccgaggagggcacctctgagtccgccacccccgagagcggccctggcacctccaccgagcccagcgagggcagcgcacccggcagccctgccggcagccccacctccacagaggagggaaccagcaccgagcccagcgaaggcagcgccccaggcaccagcaccgagcctagtgagcaggagattaaacggatcaacaagatcagaagaagacttgtgaaagacagcaacaccaagaaggccggcaagacaggccccatgaaaaccctgctggttagagtgatgacacccgatctgagagagcggctggaaaacctgagaaagaagcctgaaaatatcccccagcccatcagcaatacatctagagccaacctgaataagctgctgaccgattacaccgaaatgaagaaggcgatcctgcatgtgtactgggaagagttccagaaggaccctgtgggcctgatgagccgggtggcccagcctgccagcaagaagatcgatcagaacaagctgaaacctgagatggacgagaagggcaacctgaccaccgccggctttgcctgctctcagtgtggccagcccctgttcgtgtacaagctggagcaggtgtctgagaagggcaaggcttacaccaactacttcggacggtgcaatgtggccgagcacgaaaagctgatcctgctggcccagctgaagcccgagaaggatagcgacgaagccgtgacatatagcctgggaaagtttgggcagagggccctggatttctacagcattcatgtgaccaaggagtccacccaccccgtgaagcccctggcccagatcgccggaaacagatacgcctccggacctgtgggaaaggccctgagcgacgcatgtatgggcacaatcgcctccttcctgtctaagtaccaggacatcatcatcgaacaccagaaggtggtgaagggcaaccagaagagactggagagcctgcgggagctggccggcaaggaaaacctggaataccctagcgtgaccctgccacctcagcctcacaccaaggagggcgttgatgcctacaacgaagtgatcgcccgggtgcgaatgtgggtgaacctgaacctgtggcagaagctgaagctaagcagagatgatgccaagcctctgctgagactgaagggattcccttcctttcctctggtcgagagacaggccaacgaagtggactggtgggacatggtgtgtaacgtgaagaagctgatcaacgagaaaaaggaggatggcaaggtgttttggcagaatctggctggctacaagagacaggaagccctgagaccatacctgagcagcgaggaagatcggaagaagggaaagaaattcgctcggtaccagctgggcgacctgctgctgcacctggaaaagaagcacggcgaggactggggaaaggtgtacgacgaggcctgggagcggattgacaagaaagtggaaggcctgagcaagcacatcaagctggaagaggaacggagaagcgaggacgcccagagcaaggccgccctgaccgactggctgcgggctaaggccagcttcgtgatcgagggcctgaaggaggccgacaaggacgagttctgcagatgcgagctgaagctgcagaagtggtacggggacctgcggggaaagcccttcgccatcgaagccgagaacagcatcctggacatcagcggcttcagcaagcagtacaactgtgccttcatctggcagaaggacggcgtgaagaagctgaacctgtacctgatcatcaactacttcaagggcggcaagctgcggttcaagaagatcaaacctgaagccttcgaagccaacagattctacaccgtgatcaacaaaaagagcggcgagatcgtgcccatggaggtgaacttcaacttcgacgaccccaacctgatcatcctgcctctggcctttggcaagagacagggcagagaattcatctggaacgacctgctgtccctggaaaccggcagcctgaagctggccaacggaagagtgatcgagaagacactgtacaacagaagaacccggcaggatgagcctgccctgttcgtggccctgaccttcgagcggcgggaggtcctggactcctccaatatcaaaccaatgaacctgatcggcgtggcaagaggcgaaaacatccccgccgtgatcgccctgaccgaccccgagggctgcccactgagccggtttaaggatagcctgggaaacccaacccacatcctgagaatcggcgagagctataaggagaagcagcggaccatccaggccaagaaggaggtggagcagcggagagccggcggctacagccggaagtacgccagcaaagccaagaatctggcagacgatatggtgagaaacaccgctagagatctgctgtactacgccgtgacccaggatgccatgctgatcttcgccaacctgagccggggcttcggccggcagggcaagcggaccttcatggccgagagacagtacacacggatggaggactggctgaccgccaagctggcctacgagggcctgagcaagacctacctgtccaagacactggcccagtacacctccaagacatgcagcaactgtgggtttaccatcaccagcgccgactacgacagggtgctggagaagctgaagaagacagcaacaggctggatgaccacaattaacggcaaggagctgaaggtggagggccagattacctactacaacagatacaagagacagaacgtagtcaaggacctgtccgtcgagctggatagactgagcgaagaatctgtgaacaacgacatctcctcctggacaaagggcagaagcggagaagctctgagcctcctgaagaaaagattctcccatagacccgtgcaggagaagttcgtgtgcctgaactgcggcttcgagacacacgcagccgagcaagccgccctgaacatcgccagatcctggctgttcctgcggagccaggagtacaagaaataccagacaaacaagacaaccggcaacaccgataagagagccttcgtcgagacctggcagtccttttaccggaagaagcttaaggaggtgtggaaacctgccgtgcggtctggcggatctggcggaggctccttctaaagcccctatcacattcggcgacctggccatctacttcagccaggaggaatgggagtggctgagccccatccagaaggacctgtacgaggacgtgatgctggaaaactacagaaatctggtgtccctgggcctcagctttagacgccccaacgtgatcaccctgctggaaaagggcaaggccccatggatggtcgagcctgctagacggcggagaggacctgatagcggcagcaaggtgggatctggctccggcagcggccccaagaaaaagagaaaagtctaagctgccttctgcggggcttgccttctggccatgcccttcttctctcccttgcacctgtacctcttggtctttgaataaagcctgagtaggaaggctagcaaaaaaaaaaaaaaaaaaaaaaaaaaaaaaaaaaaaaaaaaaaaaaaaaaaaaaaaaaaaaaaaaaaaaaaaaaaaaaaa

SEQ ID NO: 18555 - RNA, 9485 nt, synthetic construct
  source 1..9485: mol_type = other RNA
aggaaataagagagaaaagaagagtaagaagaaatataagagccaccatggcccctaagaagaagcgtaaagtgagccggatggaacgcctcgtctacgaggtgcggcagaagtgcagaaacatcgaggacatctgcatctcctgcggatctctgaacgtgaccctggagcacccactgttcatcggcggcatgtgccagaactgtaaaaactgttttctggagtgtgcctatcaatacgacgatgacggctaccagagctactgcaccatctgttgcggcggaagagaggtgctgatgtgtggaaataacaactgctgccggtgcttctgcgtggaatgcgtggacctgctggtgggccccggcgccgcccaggccgctattaaggaagatccttggaactgctacatgtgcggccacaagggcacatacggcctgctgagacggagagaggactggcctagcagactgcagatgttcttcgccaataaccacgaccaggagttcgacccccctaaggtgtaccctcccgtccccgccgagaagagaaagcccatccgggtcctgagcctgttcgatggcatcgccaccggtctgctggtgctgaaggacctgggcatccaggtggataggtacattgcctccgaggtgtgcgaggactccatcaccgtgggaatggtgcgtcatcagggcaagatcatgtacgtgggcgacgtgcggagcgtgacacagaagcatatccaggagtggggccctttcgacctggtgatcggcggcagcccttgcaatgacctgagcatcgtgaacccagcccggaagggcctgtacgagggaaccggcagactgttcttcgagttttacagactgctgcacgacgcccggcctaaggaaggcgacgaccggcccttcttttggctgttcgagaatgtggtggccatgggagtcagcgacaagcgggatattagccggttcctggagagcaaccccgtgatgatcgatgccaaggaagtgagcgccgcccaccgggccagatacttctggggcaatctgcctggcatgaacagacccctggccagcaccgtgaacgacaagctggagctgcaggagtgcctggagcacggccggatcgccaagttcagcaaggtgagaaccatcaccacccgaagcaacagcatcaaacaaggcaaggaccagcactttcctgtgttcatgaacgagaaggaggacatcctgtggtgtaccgagatggagagagtgttcgggttcccagtccactacacagatgtcagcaacatgtctagactggccagacagagactgctgggaagaagctggtccgtccctgtgatcagacacctgttcgcccctctgaaggagtacttcgcctgcgtgagcagcggcaacagcaacgccaacagccggggccccagcttctctagcggcctggtgccactgtccctgagagggagccacatgggccccatggagatctacaaaaccgtgagcgcctggaagcggcagcctgtgcgcgtgctgagcctgtttcggaatatcgataaagtcctgaaaagcctgggattcctggagagcggctctggctccggcggtggcaccctgaagtacgtggaggatgtgacaaacgtggtcagacgggatgtggagaagtggggccccttcgatctggtgtacggcagcacccaacccctgggcagctcttgtgaccggtgccctggctggtacatgtttcagttccaccggatcctgcagtacgccctgccgagacaggagtcccagcggccattcttttggattttcatggacaacttgctgctgaccgaggatgaccaggaaactaccactcggttcctgcagaccgaagccgtgaccctgcaggacgtgagaggccgggactaccagaacgccatgcgggtgtggtccaacatccctggactgaaaagcaagcacgcacctctgacccctaaagaagaggagtacctgcaggcccaggtgcggagcagaagcaagctggacgcccctaaggtggatctgctggtgaagaattgcctcctgcccctgagagagtacttcaagtatttcagccagaatagtctgcccctgggaggcagcggcggcggcgccctggtgacatttgaggacgtcgccgtgcggttcacccaggaggaatgggctctgctggatccttctcagaaaatcctgtaccgggacgtgatgagagagacataccggaatctgacctccgtgggcatcaactgggaatgttgggaccttgaagcctgcttcagaagcctgggaagaaacctgagagtgcaggtggtgaagagaaagtgcgagctgaccaacagcggcccctgcgccgagggcggcccaagcagcggcgcccctcctcccagcggcggcagcccagccggctccccaacctctaccgaggagggcacctctgagtccgccacccccgagagcggccctggcacctccaccgagcccagcgagggcagcgcacccggcagccctgccggcagccccacctccacagaggagggaaccagcaccgagcccagcgaaggcagcgccccaggcaccagcaccgagcctagtgagcaggagattaaacggatcaacaagatcagaagaagacttgtgaaagacagcaacaccaagaaggccggcaagacaggccccatgaaaaccctgctggttagagtgatgacacccgatctgagagagcggctggaaaacctgagaaagaagcctgaaaatatcccccagcccatcagcaatacatctagagccaacctgaataagctgctgaccgattacaccgaaatgaagaaggcgatcctgcatgtgtactgggaagagttccagaaggaccctgtgggcctgatgagccgggtggcccagcctgccagcaagaagatcgatcagaacaagctgaaacctgagatggacgagaagggcaacctgaccaccgccggctttgcctgctctcagtgtggccagcccctgttcgtgtacaagctggagcaggtgtctgagaagggcaaggcttacaccaactacttcggacggtgcaatgtggccgagcacgaaaagctgatcctgctggcccagctgaagcccgagaaggatagcgacgaagccgtgacatatagcctgggaaagtttgggcagagggccctggatttctacagcattcatgtgaccaaggagtccacccaccccgtgaagcccctggcccagatcgccggaaacagatacgcctccggacctgtgggaaaggccctgagcgacgcatgtatgggcacaatcgcctccttcctgtctaagtaccaggacatcatcatcgaacaccagaaggtggtgaagggcaaccagaagagactggagagcctgcgggagctggccggcaaggaaaacctggaataccctagcgtgaccctgccacctcagcctcacaccaaggagggcgttgatgcctacaacgaagtgatcgcccgggtgcgaatgtgggtgaacctgaacctgtggcagaagctgaagctaagcagagatgatgccaagcctctgctgagactgaagggattcccttcctttcctctggtcgagagacaggccaacgaagtggactggtgggacatggtgtgtaacgtgaagaagctgatcaacgagaaaaaggaggatggcaaggtgttttggcagaatctggctggctacaagagacaggaagccctgagaccatacctgagcagcgaggaagatcggaagaagggaaagaaattcgctcggtaccagctgggcgacctgctgctgcacctggaaaagaagcacggcgaggactggggaaaggtgtacgacgaggcctgggagcggattgacaagaaagtggaaggcctgagcaagcacatcaagctggaagaggaacggagaagcgaggacgcccagagcaaggccgccctgaccgactggctgcgggctaaggccagcttcgtgatcgagggcctgaaggaggccgacaaggacgagttctgcagatgcgagctgaagctgcagaagtggtacggggacctgcggggaaagcccttcgccatcgaagccgagaacagcatcctggacatcagcggcttcagcaagcagtacaactgtgccttcatctggcagaaggacggcgtgaagaagctgaacctgtacctgatcatcaactacttcaagggcggcaagctgcggttcaagaagatcaaacctgaagccttcgaagccaacagattctacaccgtgatcaacaaaaagagcggcgagatcgtgcccatggaggtgaacttcaacttcgacgaccccaacctgatcatcctgcctctggcctttggcaagagacagggcagagaattcatctggaacgacctgctgtccctggaaaccggcagcctgaagctggccaacggaagagtgatcgagaagacactgtacaacagaagaacccggcaggatgagcctgccctgttcgtggccctgaccttcgagcggcgggaggtcctggactcctccaatatcaaaccaatgaacctgatcggcgtggcaagaggcgaaaacatccccgccgtgatcgccctgaccgaccccgagggctgcccactgagccggtttaaggatagcctgggaaacccaacccacatcctgagaatcggcgagagctataaggagaagcagcggaccatccaggccaagaaggaggtggagcagcggagagccggcggctacagccggaagtacgccagcaaagccaagaatctggcagacgatatggtgagaaacaccgctagagatctgctgtactacgccgtgacccaggatgccatgctgatcttcgccaacctgagccggggcttcggccggcagggcaagcggaccttcatggccgagagacagtacacacggatggaggactggctgaccgccaagctggcctacgagggcctgagcaagacctacctgtccaagacactggcccagtacacctccaagacatgcagcaactgtgggtttaccatcaccagcgccgactacgacagggtgctggagaagctgaagaagacagcaacaggctggatgaccacaattaacggcaaggagctgaaggtggagggccagattacctactacaacagatacaagagacagaacgtagtcaaggacctgtccgtcgagctggatagactgagcgaagaatctgtgaacaacgacatctcctcctggacaaagggcagaagcggagaagctctgagcctcctgaagaaaagattctcccatagacccgtgcaggagaagttcgtgtgcctgaactgcggcttcgagacacacgcagccgagcaagccgccctgaacatcgccagatcctggctgttcctgcggagccaggagtacaagaaataccagacaaacaagacaaccggcaacaccgataagagagccttcgtcgagacctggcagtccttttaccggaagaagcttaaggaggtgtggaaacctgccgtgcggtctggcggatctggcggaggctccgagatgggcctgctgacattcagagacatcgctatcgagttcagcctggaggaatggcaatgtctggactgcgcccagagaaatctgtacagagatgtgatgctggaaaactaccggaacctggtgtctctgggcatcgccgtgtccaagcccgacctgatcacctgcctcgagcagaacaaggaaagccagaacatcaagcggaacaaaatggtcgccaagcaccctgtgatgcacagccacggcggcccaagcagcggcgcccctcctcccagcggcggcagcccagccggctccccaacctctaccgaggagggcacctctgagtccgccacccccgagagcggccctggcacctccaccgagcccagcgagggcagcgcacccggcagccctgccggcagccccacctccacagaggagggaaccagcaccgagcccagcgaaggcagcgccccaggcaccagcaccgagcctagtgagcaggagattaaacggatcaacaagatcagaagaagacttgtgaaagacagcaacaccaagaaggccggcaagacaggccccatgaaaaccctgctggttagagtgatgacacccgatctgagagagcggctggaaaacctgagaaagaagcctgaaaatatcccccagcccatcagcaatacatctagagccaacctgaataagctgctgaccgattacaccgaaatgaagaaggcgatcctgcatgtgtactgggaagagttccagaaggaccctgtgggcctgatgagccgggtggcccagcctgccagcaagaagatcgatcagaacaagctgaaacctgagatggacgagaagggcaacctgaccaccgccggctttgcctgctctcagtgtggccagcccctgttcgtgtacaagctggagcaggtgtctgagaagggcaaggcttacaccaactacttcggacggtgcaatgtggccgagcacgaaaagctgatcctgctggcccagctgaagcccgagaaggatagcgacgaagccgtgacatatagcctgggaaagtttgggcagagggccctggatttctacagcattcatgtgaccaaggagtccacccaccccgtgaagcccctggcccagatcgccggaaacagatacgcctccggacctgtgggaaaggccctgagcgacgcatgtatgggcacaatcgcctccttcctgtctaagtaccaggacatcatcatcgaacaccagaaggtggtgaagggcaaccagaagagactggagagcctgcgggagctggccggcaaggaaaacctggaataccctagcgtgaccctgccacctcagcctcacaccaaggagggcgttgatgcctacaacgaagtgatcgcccgggtgcgaatgtgggtgaacctgaacctgtggcagaagctgaagctaagcagagatgatgccaagcctctgctgagactgaagggattcccttcctttcctctggtcgagagacaggccaacgaagtggactggtgggacatggtgtgtaacgtgaagaagctgatcaacgagaaaaaggaggatggcaaggtgttttggcagaatctggctggctacaagagacaggaagccctgagaccatacctgagcagcgaggaagatcggaagaagggaaagaaattcgctcggtaccagctgggcgacctgctgctgcacctggaaaagaagcacggcgaggactggggaaaggtgtacgacgaggcctgggagcggattgacaagaaagtggaaggcctgagcaagcacatcaagctggaagaggaacggagaagcgaggacgcccagagcaaggccgccctgaccgactggctgcgggctaaggccagcttcgtgatcgagggcctgaaggaggccgacaaggacgagttctgcagatgcgagctgaagctgcagaagtggtacggggacctgcggggaaagcccttcgccatcgaagccgagaacagcatcctggacatcagcggcttcagcaagcagtacaactgtgccttcatctggcagaaggacggcgtgaagaagctgaacctgtacctgatcatcaactacttcaagggcggcaagctgcggttcaagaagatcaaacctgaagccttcgaagccaacagattctacaccgtgatcaacaaaaagagcggcgagatcgtgcccatggaggtgaacttcaacttcgacgaccccaacctgatcatcctgcctctggcctttggcaagagacagggcagagaattcatctggaacgacctgctgtccctggaaaccggcagcctgaagctggccaacggaagagtgatcgagaagacactgtacaacagaagaacccggcaggatgagcctgccctgttcgtggccctgaccttcgagcggcgggaggtcctggactcctccaatatcaaaccaatgaacctgatcggcgtggcaagaggcgaaaacatccccgccgtgatcgccctgaccgaccccgagggctgcccactgagccggtttaaggatagcctgggaaacccaacccacatcctgagaatcggcgagagctataaggagaagcagcggaccatccaggccaagaaggaggtggagcagcggagagccggcggctacagccggaagtacgccagcaaagccaagaatctggcagacgatatggtgagaaacaccgctagagatctgctgtactacgccgtgacccaggatgccatgctgatcttcgccaacctgagccggggcttcggccggcagggcaagcggaccttcatggccgagagacagtacacacggatggaggactggctgaccgccaagctggcctacgagggcctgagcaagacctacctgtccaagacactggcccagtacacctccaagacatgcagcaactgtgggtttaccatcaccagcgccgactacgacagggtgctggagaagctgaagaagacagcaacaggctggatgaccacaattaacggcaaggagctgaaggtggagggccagattacctactacaacagatacaagagacagaacgtagtcaaggacctgtccgtcgagctggatagactgagcgaagaatctgtgaacaacgacatctcctcctggacaaagggcagaagcggagaagctctgagcctcctgaagaaaagattctcccatagacccgtgcaggagaagttcgtgtgcctgaactgcggcttcgagacacacgcagccgagcaagccgccctgaacatcgccagatcctggctgttcctgcggagccaggagtacaagaaataccagacaaacaagacaaccggcaacaccgataagagagccttcgtcgagacctggcagtccttttaccggaagaagcttaaggaggtgtggaaacctgccgtgcggtctggcggatctggcggaggctcctctgctgaccttcgaggacgtcgccgtgtccttcagcgaggaagaatgggagctgctcgatcctcctcagaaaaccctgtacaacgacgtgatgcaagagaactacgagacagtgatctctctgggcctgaagctgaagaacgacaccggaaatgatcagcccatcagcatcagcgccctggaaatgcaggccagcggcagcaaggtgctgcggaaggccagaatgaaagtggctcagaagacaggatctggctccggcagcggccccaagaaaaagagaaaagtctaagctgccttctgcggggcttgccttctggccatgcccttcttctctcccttgcacctgtacctcttggtctttgaataaagcctgagtaggaaggctagcaaaaaaaaaaaaaaaaaaaaaaaaaaaaaaaaaaaaaaaaaaaaaaaaaaaaaaaaaaaaaaaaaaaaaaaaaaaaaaaa

SEQ ID NO: 18556 - RNA, 9485 nt, synthetic construct
  source 1..9485: mol_type = other RNA
aggaaataagagagaaaagaagagtaagaagaaatataagagccaccatggcccctaagaagaagcgtaaagtgagccggatggaacgcctcgtctacgaggtgcggcagaagtgcagaaacatcgaggacatctgcatctcctgcggatctctgaacgtgaccctggagcacccactgttcatcggcggcatgtgccagaactgtaaaaactgttttctggagtgtgcctatcaatacgacgatgacggctaccagagctactgcaccatctgttgcggcggaagagaggtgctgatgtgtggaaataacaactgctgccggtgcttctgcgtggaatgcgtggacctgctggtgggccccggcgccgcccaggccgctattaaggaagatccttggaactgctacatgtgcggccacaagggcacatacggcctgctgagacggagagaggactggcctagcagactgcagatgttcttcgccaataaccacgaccaggagttcgacccccctaaggtgtaccctcccgtccccgccgagaagagaaagcccatccgggtcctgagcctgttcgatggcatcgccaccggtctgctggtgctgaaggacctgggcatccaggtggataggtacattgcctccgaggtgtgcgaggactccatcaccgtgggaatggtgcgtcatcagggcaagatcatgtacgtgggcgacgtgcggagcgtgacacagaagcatatccaggagtggggccctttcgacctggtgatcggcggcagcccttgcaatgacctgagcatcgtgaacccagcccggaagggcctgtacgagggaaccggcagactgttcttcgagttttacagactgctgcacgacgcccggcctaaggaaggcgacgaccggcccttcttttggctgttcgagaatgtggtggccatgggagtcagcgacaagcgggatattagccggttcctggagagcaaccccgtgatgatcgatgccaaggaagtgagcgccgcccaccgggccagatacttctggggcaatctgcctggcatgaacagacccctggccagcaccgtgaacgacaagctggagctgcaggagtgcctggagcacggccggatcgccaagttcagcaaggtgagaaccatcaccacccgaagcaacagcatcaaacaaggcaaggaccagcactttcctgtgttcatgaacgagaaggaggacatcctgtggtgtaccgagatggagagagtgttcgggttcccagtccactacacagatgtcagcaacatgtctagactggccagacagagactgctgggaagaagctggtccgtccctgtgatcagacacctgttcgcccctctgaaggagtacttcgcctgcgtgagcagcggcaacagcaacgccaacagccggggccccagcttctctagcggcctggtgccactgtccctgagagggagccacatgggccccatggagatctacaaaaccgtgagcgcctggaagcggcagcctgtgcgcgtgctgagcctgtttcggaatatcgataaagtcctgaaaagcctgggattcctggagagcggctctggctccggcggtggcaccctgaagtacgtggaggatgtgacaaacgtggtcagacgggatgtggagaagtggggccccttcgatctggtgtacggcagcacccaacccctgggcagctcttgtgaccggtgccctggctggtacatgtttcagttccaccggatcctgcagtacgccctgccgagacaggagtcccagcggccattcttttggattttcatggacaacttgctgctgaccgaggatgaccaggaaactaccactcggttcctgcagaccgaagccgtgaccctgcaggacgtgagaggccgggactaccagaacgccatgcgggtgtggtccaacatccctggactgaaaagcaagcacgcacctctgacccctaaagaagaggagtacctgcaggcccaggtgcggagcagaagcaagctggacgcccctaaggtggatctgctggtgaagaattgcctcctgcccctgagagagtacttcaagtatttcagccagaatagtctgcccctgggaggcagcggcggcggcgccctggtgacatttgaggacgtcgccgtgcggttcacccaggaggaatgggctctgctggatccttctcagaaaatcctgtaccgggacgtgatgagagagacataccggaatctgacctccgtgggcatcaactgggaatgttgggaccttgaagcctgcttcagaagcctgggaagaaacctgagagtgcaggtggtgaagagaaagtgcgagctgaccaacagcggcccctgcgccgagggcggcccaagcagcggcgcccctcctcccagcggcggcagcccagccggctccccaacctctaccgaggagggcacctctgagtccgccacccccgagagcggccctggcacctccaccgagcccagcgagggcagcgcacccggcagccctgccggcagccccacctccacagaggagggaaccagcaccgagcccagcgaaggcagcgccccaggcaccagcaccgagcctagtgagcaggagattaaacggatcaacaagatcagaagaagacttgtgaaagacagcaacaccaagaaggccggcaagacaggccccatgaaaaccctgctggttagagtgatgacacccgatctgagagagcggctggaaaacctgagaaagaagcctgaaaatatcccccagcccatcagcaatacatctagagccaacctgaataagctgctgaccgattacaccgaaatgaagaaggcgatcctgcatgtgtactgggaagagttccagaaggaccctgtgggcctgatgagccgggtggcccagcctgccagcaagaagatcgatcagaacaagctgaaacctgagatggacgagaagggcaacctgaccaccgccggctttgcctgctctcagtgtggccagcccctgttcgtgtacaagctggagcaggtgtctgagaagggcaaggcttacaccaactacttcggacggtgcaatgtggccgagcacgaaaagctgatcctgctggcccagctgaagcccgagaaggatagcgacgaagccgtgacatatagcctgggaaagtttgggcagagggccctggatttctacagcattcatgtgaccaaggagtccacccaccccgtgaagcccctggcccagatcgccggaaacagatacgcctccggacctgtgggaaaggccctgagcgacgcatgtatgggcacaatcgcctccttcctgtctaagtaccaggacatcatcatcgaacaccagaaggtggtgaagggcaaccagaagagactggagagcctgcgggagctggccggcaaggaaaacctggaataccctagcgtgaccctgccacctcagcctcacaccaaggagggcgttgatgcctacaacgaagtgatcgcccgggtgcgaatgtgggtgaacctgaacctgtggcagaagctgaagctaagcagagatgatgccaagcctctgctgagactgaagggattcccttcctttcctctggtcgagagacaggccaacgaagtggactggtgggacatggtgtgtaacgtgaagaagctgatcaacgagaaaaaggaggatggcaaggtgttttggcagaatctggctggctacaagagacaggaagccctgagaccatacctgagcagcgaggaagatcggaagaagggaaagaaattcgctcggtaccagctgggcgacctgctgctgcacctggaaaagaagcacggcgaggactggggaaaggtgtacgacgaggcctgggagcggattgacaagaaagtggaaggcctgagcaagcacatcaagctggaagaggaacggagaagcgaggacgcccagagcaaggccgccctgaccgactggctgcgggctaaggccagcttcgtgatcgagggcctgaaggaggccgacaaggacgagttctgcagatgcgagctgaagctgcagaagtggtacggggacctgcggggaaagcccttcgccatcgaagccgagaacagcatcctggacatcagcggcttcagcaagcagtacaactgtgccttcatctggcagaaggacggcgtgaagaagctgaacctgtacctgatcatcaactacttcaagggcggcaagctgcggttcaagaagatcaaacctgaagccttcgaagccaacagattctacaccgtgatcaacaaaaagagcggcgagatcgtgcccatggaggtgaacttcaacttcgacgaccccaacctgatcatcctgcctctggcctttggcaagagacagggcagagaattcatctggaacgacctgctgtccctggaaaccggcagcctgaagctggccaacggaagagtgatcgagaagacactgtacaacagaagaacccggcaggatgagcctgccctgttcgtggccctgaccttcgagcggcgggaggtcctggactcctccaatatcaaaccaatgaacctgatcggcgtggcaagaggcgaaaacatccccgccgtgatcgccctgaccgaccccgagggctgcccactgagccggtttaaggatagcctgggaaacccaacccacatcctgagaatcggcgagagctataaggagaagcagcggaccatccaggccaagaaggaggtggagcagcggagagccggcggctacagccggaagtacgccagcaaagccaagaatctggcagacgatatggtgagaaacaccgctagagatctgctgtactacgccgtgacccaggatgccatgctgatcttcgccaacctgagccggggcttcggccggcagggcaagcggaccttcatggccgagagacagtacacacggatggaggactggctgaccgccaagctggcctacgagggcctgagcaagacctacctgtccaagacactggcccagtacacctccaagacatgcagcaactgtgggtttaccatcaccagcgccgactacgacagggtgctggagaagctgaagaagacagcaacaggctggatgaccacaattaacggcaaggagctgaaggtggagggccagattacctactacaacagatacaagagacagaacgtagtcaaggacctgtccgtcgagctggatagactgagcgaagaatctgtgaacaacgacatctcctcctggacaaagggcagaagcggagaagctctgagcctcctgaagaaaagattctcccatagacccgtgcaggagaagttcgtgtgcctgaactgcggcttcgagacacacgcagccgagcaagccgccctgaacatcgccagatcctggctgttcctgcggagccaggagtacaagaaataccagacaaacaagacaaccggcaacaccgataagagagccttcgtcgagacctggcagtccttttaccggaagaagcttaaggaggtgtggaaacctgccgtgcggtctggcggatctggcggaggctccctgctgaccttcgaggacgtcgccgtgtccttcagcgaggaagaatgggagctgctcgatcctcctcagaaaaccctgtacaacgacgtgatgcaagagaactacgagacagtgatctctctgggcctgaagctgaagaacgacaccggaaatgatcagcccatcagcatcagcgccctggaaatgcaggccagcggcagcaaggtgctgcggaaggccagaatgaaagtggctcagaagacaggcggcccaagcagcggcgcccctcctcccagcggcggcagcccagccggctccccaacctctaccgaggagggcacctctgagtccgccacccccgagagcggccctggcacctccaccgagcccagcgagggcagcgcacccggcagccctgccggcagccccacctccacagaggagggaaccagcaccgagcccagcgaaggcagcgccccaggcaccagcaccgagcctagtgagcaggagattaaacggatcaacaagatcagaagaagacttgtgaaagacagcaacaccaagaaggccggcaagacaggccccatgaaaaccctgctggttagagtgatgacacccgatctgagagagcggctggaaaacctgagaaagaagcctgaaaatatcccccagcccatcagcaatacatctagagccaacctgaataagctgctgaccgattacaccgaaatgaagaaggcgatcctgcatgtgtactgggaagagttccagaaggaccctgtgggcctgatgagccgggtggcccagcctgccagcaagaagatcgatcagaacaagctgaaacctgagatggacgagaagggcaacctgaccaccgccggctttgcctgctctcagtgtggccagcccctgttcgtgtacaagctggagcaggtgtctgagaagggcaaggcttacaccaactacttcggacggtgcaatgtggccgagcacgaaaagctgatcctgctggcccagctgaagcccgagaaggatagcgacgaagccgtgacatatagcctgggaaagtttgggcagagggccctggatttctacagcattcatgtgaccaaggagtccacccaccccgtgaagcccctggcccagatcgccggaaacagatacgcctccggacctgtgggaaaggccctgagcgacgcatgtatgggcacaatcgcctccttcctgtctaagtaccaggacatcatcatcgaacaccagaaggtggtgaagggcaaccagaagagactggagagcctgcgggagctggccggcaaggaaaacctggaataccctagcgtgaccctgccacctcagcctcacaccaaggagggcgttgatgcctacaacgaagtgatcgcccgggtgcgaatgtgggtgaacctgaacctgtggcagaagctgaagctaagcagagatgatgccaagcctctgctgagactgaagggattcccttcctttcctctggtcgagagacaggccaacgaagtggactggtgggacatggtgtgtaacgtgaagaagctgatcaacgagaaaaaggaggatggcaaggtgttttggcagaatctggctggctacaagagacaggaagccctgagaccatacctgagcagcgaggaagatcggaagaagggaaagaaattcgctcggtaccagctgggcgacctgctgctgcacctggaaaagaagcacggcgaggactggggaaaggtgtacgacgaggcctgggagcggattgacaagaaagtggaaggcctgagcaagcacatcaagctggaagaggaacggagaagcgaggacgcccagagcaaggccgccctgaccgactggctgcgggctaaggccagcttcgtgatcgagggcctgaaggaggccgacaaggacgagttctgcagatgcgagctgaagctgcagaagtggtacggggacctgcggggaaagcccttcgccatcgaagccgagaacagcatcctggacatcagcggcttcagcaagcagtacaactgtgccttcatctggcagaaggacggcgtgaagaagctgaacctgtacctgatcatcaactacttcaagggcggcaagctgcggttcaagaagatcaaacctgaagccttcgaagccaacagattctacaccgtgatcaacaaaaagagcggcgagatcgtgcccatggaggtgaacttcaacttcgacgaccccaacctgatcatcctgcctctggcctttggcaagagacagggcagagaattcatctggaacgacctgctgtccctggaaaccggcagcctgaagctggccaacggaagagtgatcgagaagacactgtacaacagaagaacccggcaggatgagcctgccctgttcgtggccctgaccttcgagcggcgggaggtcctggactcctccaatatcaaaccaatgaacctgatcggcgtggcaagaggcgaaaacatccccgccgtgatcgccctgaccgaccccgagggctgcccactgagccggtttaaggatagcctgggaaacccaacccacatcctgagaatcggcgagagctataaggagaagcagcggaccatccaggccaagaaggaggtggagcagcggagagccggcggctacagccggaagtacgccagcaaagccaagaatctggcagacgatatggtgagaaacaccgctagagatctgctgtactacgccgtgacccaggatgccatgctgatcttcgccaacctgagccggggcttcggccggcagggcaagcggaccttcatggccgagagacagtacacacggatggaggactggctgaccgccaagctggcctacgagggcctgagcaagacctacctgtccaagacactggcccagtacacctccaagacatgcagcaactgtgggtttaccatcaccagcgccgactacgacagggtgctggagaagctgaagaagacagcaacaggctggatgaccacaattaacggcaaggagctgaaggtggagggccagattacctactacaacagatacaagagacagaacgtagtcaaggacctgtccgtcgagctggatagactgagcgaagaatctgtgaacaacgacatctcctcctggacaaagggcagaagcggagaagctctgagcctcctgaagaaaagattctcccatagacccgtgcaggagaagttcgtgtgcctgaactgcggcttcgagacacacgcagccgagcaagccgccctgaacatcgccagatcctggctgttcctgcggagccaggagtacaagaaataccagacaaacaagacaaccggcaacaccgataagagagccttcgtcgagacctggcagtccttttaccggaagaagcttaaggaggtgtggaaacctgccgtgcggtctggcggatctggcggaggctcctgccctggtgacatttgaggacgtcgccgtgcggttcacccaggaggaatgggctctgctggatccttctcagaaaatcctgtaccgggacgtgatgagagagacataccggaatctgacctccgtgggcatcaactgggaatgttgggaccttgaagcctgcttcagaagcctgggaagaaacctgagagtgcaggtggtgaagagaaagtgcgagctgaccaacagcggcccctgcgccgagggatctggctccggcagcggccccaagaaaaagagaaaagtctaagctgccttctgcggggcttgccttctggccatgcccttcttctctcccttgcacctgtacctcttggtctttgaataaagcctgagtaggaaggctagcaaaaaaaaaaaaaaaaaaaaaaaaaaaaaaaaaaaaaaaaaaaaaaaaaaaaaaaaaaaaaaaaaaaaaaaaaaaaaaaa

SEQ ID NO: 18557 - RNA, 9485 nt, synthetic construct
  source 1..9485: mol_type = other RNA
aggaaataagagagaaaagaagagtaagaagaaatataagagccaccatggcccctaagaagaagcgtaaagtgagccggatggaacgcctcgtctacgaggtgcggcagaagtgcagaaacatcgaggacatctgcatctcctgcggatctctgaacgtgaccctggagcacccactgttcatcggcggcatgtgccagaactgtaaaaactgttttctggagtgtgcctatcaatacgacgatgacggctaccagagctactgcaccatctgttgcggcggaagagaggtgctgatgtgtggaaataacaactgctgccggtgcttctgcgtggaatgcgtggacctgctggtgggccccggcgccgcccaggccgctattaaggaagatccttggaactgctacatgtgcggccacaagggcacatacggcctgctgagacggagagaggactggcctagcagactgcagatgttcttcgccaataaccacgaccaggagttcgacccccctaaggtgtaccctcccgtccccgccgagaagagaaagcccatccgggtcctgagcctgttcgatggcatcgccaccggtctgctggtgctgaaggacctgggcatccaggtggataggtacattgcctccgaggtgtgcgaggactccatcaccgtgggaatggtgcgtcatcagggcaagatcatgtacgtgggcgacgtgcggagcgtgacacagaagcatatccaggagtggggccctttcgacctggtgatcggcggcagcccttgcaatgacctgagcatcgtgaacccagcccggaagggcctgtacgagggaaccggcagactgttcttcgagttttacagactgctgcacgacgcccggcctaaggaaggcgacgaccggcccttcttttggctgttcgagaatgtggtggccatgggagtcagcgacaagcgggatattagccggttcctggagagcaaccccgtgatgatcgatgccaaggaagtgagcgccgcccaccgggccagatacttctggggcaatctgcctggcatgaacagacccctggccagcaccgtgaacgacaagctggagctgcaggagtgcctggagcacggccggatcgccaagttcagcaaggtgagaaccatcaccacccgaagcaacagcatcaaacaaggcaaggaccagcactttcctgtgttcatgaacgagaaggaggacatcctgtggtgtaccgagatggagagagtgttcgggttcccagtccactacacagatgtcagcaacatgtctagactggccagacagagactgctgggaagaagctggtccgtccctgtgatcagacacctgttcgcccctctgaaggagtacttcgcctgcgtgagcagcggcaacagcaacgccaacagccggggccccagcttctctagcggcctggtgccactgtccctgagagggagccacatgggccccatggagatctacaaaaccgtgagcgcctggaagcggcagcctgtgcgcgtgctgagcctgtttcggaatatcgataaagtcctgaaaagcctgggattcctggagagcggctctggctccggcggtggcaccctgaagtacgtggaggatgtgacaaacgtggtcagacgggatgtggagaagtggggccccttcgatctggtgtacggcagcacccaacccctgggcagctcttgtgaccggtgccctggctggtacatgtttcagttccaccggatcctgcagtacgccctgccgagacaggagtcccagcggccattcttttggattttcatggacaacttgctgctgaccgaggatgaccaggaaactaccactcggttcctgcagaccgaagccgtgaccctgcaggacgtgagaggccgggactaccagaacgccatgcgggtgtggtccaacatccctggactgaaaagcaagcacgcacctctgacccctaaagaagaggagtacctgcaggcccaggtgcggagcagaagcaagctggacgcccctaaggtggatctgctggtgaagaattgcctcctgcccctgagagagtacttcaagtatttcagccagaatagtctgcccctgggaggcagcggcggcggcgccctggtgacatttgaggacgtcgccgtgcggttcacccaggaggaatgggctctgctggatccttctcagaaaatcctgtaccgggacgtgatgagagagacataccggaatctgacctccgtgggcatcaactgggaatgttgggaccttgaagcctgcttcagaagcctgggaagaaacctgagagtgcaggtggtgaagagaaagtgcgagctgaccaacagcggcccctgcgccgagggcggcccaagcagcggcgcccctcctcccagcggcggcagcccagccggctccccaacctctaccgaggagggcacctctgagtccgccacccccgagagcggccctggcacctccaccgagcccagcgagggcagcgcacccggcagccctgccggcagccccacctccacagaggagggaaccagcaccgagcccagcgaaggcagcgccccaggcaccagcaccgagcctagtgagcaggagattaaacggatcaacaagatcagaagaagacttgtgaaagacagcaacaccaagaaggccggcaagacaggccccatgaaaaccctgctggttagagtgatgacacccgatctgagagagcggctggaaaacctgagaaagaagcctgaaaatatcccccagcccatcagcaatacatctagagccaacctgaataagctgctgaccgattacaccgaaatgaagaaggcgatcctgcatgtgtactgggaagagttccagaaggaccctgtgggcctgatgagccgggtggcccagcctgccagcaagaagatcgatcagaacaagctgaaacctgagatggacgagaagggcaacctgaccaccgccggctttgcctgctctcagtgtggccagcccctgttcgtgtacaagctggagcaggtgtctgagaagggcaaggcttacaccaactacttcggacggtgcaatgtggccgagcacgaaaagctgatcctgctggcccagctgaagcccgagaaggatagcgacgaagccgtgacatatagcctgggaaagtttgggcagagggccctggatttctacagcattcatgtgaccaaggagtccacccaccccgtgaagcccctggcccagatcgccggaaacagatacgcctccggacctgtgggaaaggccctgagcgacgcatgtatgggcacaatcgcctccttcctgtctaagtaccaggacatcatcatcgaacaccagaaggtggtgaagggcaaccagaagagactggagagcctgcgggagctggccggcaaggaaaacctggaataccctagcgtgaccctgccacctcagcctcacaccaaggagggcgttgatgcctacaacgaagtgatcgcccgggtgcgaatgtgggtgaacctgaacctgtggcagaagctgaagctaagcagagatgatgccaagcctctgctgagactgaagggattcccttcctttcctctggtcgagagacaggccaacgaagtggactggtgggacatggtgtgtaacgtgaagaagctgatcaacgagaaaaaggaggatggcaaggtgttttggcagaatctggctggctacaagagacaggaagccctgagaccatacctgagcagcgaggaagatcggaagaagggaaagaaattcgctcggtaccagctgggcgacctgctgctgcacctggaaaagaagcacggcgaggactggggaaaggtgtacgacgaggcctgggagcggattgacaagaaagtggaaggcctgagcaagcacatcaagctggaagaggaacggagaagcgaggacgcccagagcaaggccgccctgaccgactggctgcgggctaaggccagcttcgtgatcgagggcctgaaggaggccgacaaggacgagttctgcagatgcgagctgaagctgcagaagtggtacggggacctgcggggaaagcccttcgccatcgaagccgagaacagcatcctggacatcagcggcttcagcaagcagtacaactgtgccttcatctggcagaaggacggcgtgaagaagctgaacctgtacctgatcatcaactacttcaagggcggcaagctgcggttcaagaagatcaaacctgaagccttcgaagccaacagattctacaccgtgatcaacaaaaagagcggcgagatcgtgcccatggaggtgaacttcaacttcgacgaccccaacctgatcatcctgcctctggcctttggcaagagacagggcagagaattcatctggaacgacctgctgtccctggaaaccggcagcctgaagctggccaacggaagagtgatcgagaagacactgtacaacagaagaacccggcaggatgagcctgccctgttcgtggccctgaccttcgagcggcgggaggtcctggactcctccaatatcaaaccaatgaacctgatcggcgtggcaagaggcgaaaacatccccgccgtgatcgccctgaccgaccccgagggctgcccactgagccggtttaaggatagcctgggaaacccaacccacatcctgagaatcggcgagagctataaggagaagcagcggaccatccaggccaagaaggaggtggagcagcggagagccggcggctacagccggaagtacgccagcaaagccaagaatctggcagacgatatggtgagaaacaccgctagagatctgctgtactacgccgtgacccaggatgccatgctgatcttcgccaacctgagccggggcttcggccggcagggcaagcggaccttcatggccgagagacagtacacacggatggaggactggctgaccgccaagctggcctacgagggcctgagcaagacctacctgtccaagacactggcccagtacacctccaagacatgcagcaactgtgggtttaccatcaccagcgccgactacgacagggtgctggagaagctgaagaagacagcaacaggctggatgaccacaattaacggcaaggagctgaaggtggagggccagattacctactacaacagatacaagagacagaacgtagtcaaggacctgtccgtcgagctggatagactgagcgaagaatctgtgaacaacgacatctcctcctggacaaagggcagaagcggagaagctctgagcctcctgaagaaaagattctcccatagacccgtgcaggagaagttcgtgtgcctgaactgcggcttcgagacacacgcagccgagcaagccgccctgaacatcgccagatcctggctgttcctgcggagccaggagtacaagaaataccagacaaacaagacaaccggcaacaccgataagagagccttcgtcgagacctggcagtccttttaccggaagaagcttaaggaggtgtggaaacctgccgtgcggtctggcggatctggcggaggctccctgctgaccttcgaggacgtcgccgtgtccttcagcgaggaagaatgggagctgctcgatcctcctcagaaaaccctgtacaacgacgtgatgcaagagaactacgagacagtgatctctctgggcctgaagctgaagaacgacaccggaaatgatcagcccatcagcatcagcgccctggaaatgcaggccagcggcagcaaggtgctgcggaaggccagaatgaaagtggctcagaagacaggcggcccaagcagcggcgcccctcctcccagcggcggcagcccagccggctccccaacctctaccgaggagggcacctctgagtccgccacccccgagagcggccctggcacctccaccgagcccagcgagggcagcgcacccggcagccctgccggcagccccacctccacagaggagggaaccagcaccgagcccagcgaaggcagcgccccaggcaccagcaccgagcctagtgagcaggagattaaacggatcaacaagatcagaagaagacttgtgaaagacagcaacaccaagaaggccggcaagacaggccccatgaaaaccctgctggttagagtgatgacacccgatctgagagagcggctggaaaacctgagaaagaagcctgaaaatatcccccagcccatcagcaatacatctagagccaacctgaataagctgctgaccgattacaccgaaatgaagaaggcgatcctgcatgtgtactgggaagagttccagaaggaccctgtgggcctgatgagccgggtggcccagcctgccagcaagaagatcgatcagaacaagctgaaacctgagatggacgagaagggcaacctgaccaccgccggctttgcctgctctcagtgtggccagcccctgttcgtgtacaagctggagcaggtgtctgagaagggcaaggcttacaccaactacttcggacggtgcaatgtggccgagcacgaaaagctgatcctgctggcccagctgaagcccgagaaggatagcgacgaagccgtgacatatagcctgggaaagtttgggcagagggccctggatttctacagcattcatgtgaccaaggagtccacccaccccgtgaagcccctggcccagatcgccggaaacagatacgcctccggacctgtgggaaaggccctgagcgacgcatgtatgggcacaatcgcctccttcctgtctaagtaccaggacatcatcatcgaacaccagaaggtggtgaagggcaaccagaagagactggagagcctgcgggagctggccggcaaggaaaacctggaataccctagcgtgaccctgccacctcagcctcacaccaaggagggcgttgatgcctacaacgaagtgatcgcccgggtgcgaatgtgggtgaacctgaacctgtggcagaagctgaagctaagcagagatgatgccaagcctctgctgagactgaagggattcccttcctttcctctggtcgagagacaggccaacgaagtggactggtgggacatggtgtgtaacgtgaagaagctgatcaacgagaaaaaggaggatggcaaggtgttttggcagaatctggctggctacaagagacaggaagccctgagaccatacctgagcagcgaggaagatcggaagaagggaaagaaattcgctcggtaccagctgggcgacctgctgctgcacctggaaaagaagcacggcgaggactggggaaaggtgtacgacgaggcctgggagcggattgacaagaaagtggaaggcctgagcaagcacatcaagctggaagaggaacggagaagcgaggacgcccagagcaaggccgccctgaccgactggctgcgggctaaggccagcttcgtgatcgagggcctgaaggaggccgacaaggacgagttctgcagatgcgagctgaagctgcagaagtggtacggggacctgcggggaaagcccttcgccatcgaagccgagaacagcatcctggacatcagcggcttcagcaagcagtacaactgtgccttcatctggcagaaggacggcgtgaagaagctgaacctgtacctgatcatcaactacttcaagggcggcaagctgcggttcaagaagatcaaacctgaagccttcgaagccaacagattctacaccgtgatcaacaaaaagagcggcgagatcgtgcccatggaggtgaacttcaacttcgacgaccccaacctgatcatcctgcctctggcctttggcaagagacagggcagagaattcatctggaacgacctgctgtccctggaaaccggcagcctgaagctggccaacggaagagtgatcgagaagacactgtacaacagaagaacccggcaggatgagcctgccctgttcgtggccctgaccttcgagcggcgggaggtcctggactcctccaatatcaaaccaatgaacctgatcggcgtggcaagaggcgaaaacatccccgccgtgatcgccctgaccgaccccgagggctgcccactgagccggtttaaggatagcctgggaaacccaacccacatcctgagaatcggcgagagctataaggagaagcagcggaccatccaggccaagaaggaggtggagcagcggagagccggcggctacagccggaagtacgccagcaaagccaagaatctggcagacgatatggtgagaaacaccgctagagatctgctgtactacgccgtgacccaggatgccatgctgatcttcgccaacctgagccggggcttcggccggcagggcaagcggaccttcatggccgagagacagtacacacggatggaggactggctgaccgccaagctggcctacgagggcctgagcaagacctacctgtccaagacactggcccagtacacctccaagacatgcagcaactgtgggtttaccatcaccagcgccgactacgacagggtgctggagaagctgaagaagacagcaacaggctggatgaccacaattaacggcaaggagctgaaggtggagggccagattacctactacaacagatacaagagacagaacgtagtcaaggacctgtccgtcgagctggatagactgagcgaagaatctgtgaacaacgacatctcctcctggacaaagggcagaagcggagaagctctgagcctcctgaagaaaagattctcccatagacccgtgcaggagaagttcgtgtgcctgaactgcggcttcgagacacacgcagccgagcaagccgccctgaacatcgccagatcctggctgttcctgcggagccaggagtacaagaaataccagacaaacaagacaaccggcaacaccgataagagagccttcgtcgagacctggcagtccttttaccggaagaagcttaaggaggtgtggaaacctgccgtgcggtctggcggatctggcggaggctccttctacacctgtgaccttcgaggatgtggtggtctacttcaccgccgctgagtgggtgcacctgacaaactggcaaagagatttttatcaggccgtgatgatggaaacctacgagctggtggccagcgtggctggcgacggcgttccaatggccgaggacgaggaaggcggagtggaaagacccgtgtggcagtacatccccagaggcaagcggcggagaaagacccctcagcctcgcgccgacggatctggctccggcagcggccccaagaaaaagagaaaagtctaagctgccttctgcggggcttgccttctggccatgcccttcttctctcccttgcacctgtacctcttggtctttgaataaagcctgagtaggaaggctagcaaaaaaaaaaaaaaaaaaaaaaaaaaaaaaaaaaaaaaaaaaaaaaaaaaaaaaaaaaaaaaaaaaaaaaaaaaaaaaaa

SEQ ID NO: 18558 - RNA, 9485 nt, synthetic construct
  source 1..9485: mol_type = other RNA
aggaaataagagagaaaagaagagtaagaagaaatataagagccaccatggcccctaagaagaagcgtaaagtgagccggatggaacgcctcgtctacgaggtgcggcagaagtgcagaaacatcgaggacatctgcatctcctgcggatctctgaacgtgaccctggagcacccactgttcatcggcggcatgtgccagaactgtaaaaactgttttctggagtgtgcctatcaatacgacgatgacggctaccagagctactgcaccatctgttgcggcggaagagaggtgctgatgtgtggaaataacaactgctgccggtgcttctgcgtggaatgcgtggacctgctggtgggccccggcgccgcccaggccgctattaaggaagatccttggaactgctacatgtgcggccacaagggcacatacggcctgctgagacggagagaggactggcctagcagactgcagatgttcttcgccaataaccacgaccaggagttcgacccccctaaggtgtaccctcccgtccccgccgagaagagaaagcccatccgggtcctgagcctgttcgatggcatcgccaccggtctgctggtgctgaaggacctgggcatccaggtggataggtacattgcctccgaggtgtgcgaggactccatcaccgtgggaatggtgcgtcatcagggcaagatcatgtacgtgggcgacgtgcggagcgtgacacagaagcatatccaggagtggggccctttcgacctggtgatcggcggcagcccttgcaatgacctgagcatcgtgaacccagcccggaagggcctgtacgagggaaccggcagactgttcttcgagttttacagactgctgcacgacgcccggcctaaggaaggcgacgaccggcccttcttttggctgttcgagaatgtggtggccatgggagtcagcgacaagcgggatattagccggttcctggagagcaaccccgtgatgatcgatgccaaggaagtgagcgccgcccaccgggccagatacttctggggcaatctgcctggcatgaacagacccctggccagcaccgtgaacgacaagctggagctgcaggagtgcctggagcacggccggatcgccaagttcagcaaggtgagaaccatcaccacccgaagcaacagcatcaaacaaggcaaggaccagcactttcctgtgttcatgaacgagaaggaggacatcctgtggtgtaccgagatggagagagtgttcgggttcccagtccactacacagatgtcagcaacatgtctagactggccagacagagactgctgggaagaagctggtccgtccctgtgatcagacacctgttcgcccctctgaaggagtacttcgcctgcgtgagcagcggcaacagcaacgccaacagccggggccccagcttctctagcggcctggtgccactgtccctgagagggagccacatgggccccatggagatctacaaaaccgtgagcgcctggaagcggcagcctgtgcgcgtgctgagcctgtttcggaatatcgataaagtcctgaaaagcctgggattcctggagagcggctctggctccggcggtggcaccctgaagtacgtggaggatgtgacaaacgtggtcagacgggatgtggagaagtggggccccttcgatctggtgtacggcagcacccaacccctgggcagctcttgtgaccggtgccctggctggtacatgtttcagttccaccggatcctgcagtacgccctgccgagacaggagtcccagcggccattcttttggattttcatggacaacttgctgctgaccgaggatgaccaggaaactaccactcggttcctgcagaccgaagccgtgaccctgcaggacgtgagaggccgggactaccagaacgccatgcgggtgtggtccaacatccctggactgaaaagcaagcacgcacctctgacccctaaagaagaggagtacctgcaggcccaggtgcggagcagaagcaagctggacgcccctaaggtggatctgctggtgaagaattgcctcctgcccctgagagagtacttcaagtatttcagccagaatagtctgcccctgggaggcagcggcggcggcgccctggtgacatttgaggacgtcgccgtgcggttcacccaggaggaatgggctctgctggatccttctcagaaaatcctgtaccgggacgtgatgagagagacataccggaatctgacctccgtgggcatcaactgggaatgttgggaccttgaagcctgcttcagaagcctgggaagaaacctgagagtgcaggtggtgaagagaaagtgcgagctgaccaacagcggcccctgcgccgagggcggcccaagcagcggcgcccctcctcccagcggcggcagcccagccggctccccaacctctaccgaggagggcacctctgagtccgccacccccgagagcggccctggcacctccaccgagcccagcgagggcagcgcacccggcagccctgccggcagccccacctccacagaggagggaaccagcaccgagcccagcgaaggcagcgccccaggcaccagcaccgagcctagtgagcaggagattaaacggatcaacaagatcagaagaagacttgtgaaagacagcaacaccaagaaggccggcaagacaggccccatgaaaaccctgctggttagagtgatgacacccgatctgagagagcggctggaaaacctgagaaagaagcctgaaaatatcccccagcccatcagcaatacatctagagccaacctgaataagctgctgaccgattacaccgaaatgaagaaggcgatcctgcatgtgtactgggaagagttccagaaggaccctgtgggcctgatgagccgggtggcccagcctgccagcaagaagatcgatcagaacaagctgaaacctgagatggacgagaagggcaacctgaccaccgccggctttgcctgctctcagtgtggccagcccctgttcgtgtacaagctggagcaggtgtctgagaagggcaaggcttacaccaactacttcggacggtgcaatgtggccgagcacgaaaagctgatcctgctggcccagctgaagcccgagaaggatagcgacgaagccgtgacatatagcctgggaaagtttgggcagagggccctggatttctacagcattcatgtgaccaaggagtccacccaccccgtgaagcccctggcccagatcgccggaaacagatacgcctccggacctgtgggaaaggccctgagcgacgcatgtatgggcacaatcgcctccttcctgtctaagtaccaggacatcatcatcgaacaccagaaggtggtgaagggcaaccagaagagactggagagcctgcgggagctggccggcaaggaaaacctggaataccctagcgtgaccctgccacctcagcctcacaccaaggagggcgttgatgcctacaacgaagtgatcgcccgggtgcgaatgtgggtgaacctgaacctgtggcagaagctgaagctaagcagagatgatgccaagcctctgctgagactgaagggattcccttcctttcctctggtcgagagacaggccaacgaagtggactggtgggacatggtgtgtaacgtgaagaagctgatcaacgagaaaaaggaggatggcaaggtgttttggcagaatctggctggctacaagagacaggaagccctgagaccatacctgagcagcgaggaagatcggaagaagggaaagaaattcgctcggtaccagctgggcgacctgctgctgcacctggaaaagaagcacggcgaggactggggaaaggtgtacgacgaggcctgggagcggattgacaagaaagtggaaggcctgagcaagcacatcaagctggaagaggaacggagaagcgaggacgcccagagcaaggccgccctgaccgactggctgcgggctaaggccagcttcgtgatcgagggcctgaaggaggccgacaaggacgagttctgcagatgcgagctgaagctgcagaagtggtacggggacctgcggggaaagcccttcgccatcgaagccgagaacagcatcctggacatcagcggcttcagcaagcagtacaactgtgccttcatctggcagaaggacggcgtgaagaagctgaacctgtacctgatcatcaactacttcaagggcggcaagctgcggttcaagaagatcaaacctgaagccttcgaagccaacagattctacaccgtgatcaacaaaaagagcggcgagatcgtgcccatggaggtgaacttcaacttcgacgaccccaacctgatcatcctgcctctggcctttggcaagagacagggcagagaattcatctggaacgacctgctgtccctggaaaccggcagcctgaagctggccaacggaagagtgatcgagaagacactgtacaacagaagaacccggcaggatgagcctgccctgttcgtggccctgaccttcgagcggcgggaggtcctggactcctccaatatcaaaccaatgaacctgatcggcgtggcaagaggcgaaaacatccccgccgtgatcgccctgaccgaccccgagggctgcccactgagccggtttaaggatagcctgggaaacccaacccacatcctgagaatcggcgagagctataaggagaagcagcggaccatccaggccaagaaggaggtggagcagcggagagccggcggctacagccggaagtacgccagcaaagccaagaatctggcagacgatatggtgagaaacaccgctagagatctgctgtactacgccgtgacccaggatgccatgctgatcttcgccaacctgagccggggcttcggccggcagggcaagcggaccttcatggccgagagacagtacacacggatggaggactggctgaccgccaagctggcctacgagggcctgagcaagacctacctgtccaagacactggcccagtacacctccaagacatgcagcaactgtgggtttaccatcaccagcgccgactacgacagggtgctggagaagctgaagaagacagcaacaggctggatgaccacaattaacggcaaggagctgaaggtggagggccagattacctactacaacagatacaagagacagaacgtagtcaaggacctgtccgtcgagctggatagactgagcgaagaatctgtgaacaacgacatctcctcctggacaaagggcagaagcggagaagctctgagcctcctgaagaaaagattctcccatagacccgtgcaggagaagttcgtgtgcctgaactgcggcttcgagacacacgcagccgagcaagccgccctgaacatcgccagatcctggctgttcctgcggagccaggagtacaagaaataccagacaaacaagacaaccggcaacaccgataagagagccttcgtcgagacctggcagtccttttaccggaagaagcttaaggaggtgtggaaacctgccgtgcggtctggcggatctggcggaggctccctgctgaccttcgaggacgtcgccgtgtccttcagcgaggaagaatgggagctgctcgatcctcctcagaaaaccctgtacaacgacgtgatgcaagagaactacgagacagtgatctctctgggcctgaagctgaagaacgacaccggaaatgatcagcccatcagcatcagcgccctggaaatgcaggccagcggcagcaaggtgctgcggaaggccagaatgaaagtggctcagaagacaggcggcccaagcagcggcgcccctcctcccagcggcggcagcccagccggctccccaacctctaccgaggagggcacctctgagtccgccacccccgagagcggccctggcacctccaccgagcccagcgagggcagcgcacccggcagccctgccggcagccccacctccacagaggagggaaccagcaccgagcccagcgaaggcagcgccccaggcaccagcaccgagcctagtgagcaggagattaaacggatcaacaagatcagaagaagacttgtgaaagacagcaacaccaagaaggccggcaagacaggccccatgaaaaccctgctggttagagtgatgacacccgatctgagagagcggctggaaaacctgagaaagaagcctgaaaatatcccccagcccatcagcaatacatctagagccaacctgaataagctgctgaccgattacaccgaaatgaagaaggcgatcctgcatgtgtactgggaagagttccagaaggaccctgtgggcctgatgagccgggtggcccagcctgccagcaagaagatcgatcagaacaagctgaaacctgagatggacgagaagggcaacctgaccaccgccggctttgcctgctctcagtgtggccagcccctgttcgtgtacaagctggagcaggtgtctgagaagggcaaggcttacaccaactacttcggacggtgcaatgtggccgagcacgaaaagctgatcctgctggcccagctgaagcccgagaaggatagcgacgaagccgtgacatatagcctgggaaagtttgggcagagggccctggatttctacagcattcatgtgaccaaggagtccacccaccccgtgaagcccctggcccagatcgccggaaacagatacgcctccggacctgtgggaaaggccctgagcgacgcatgtatgggcacaatcgcctccttcctgtctaagtaccaggacatcatcatcgaacaccagaaggtggtgaagggcaaccagaagagactggagagcctgcgggagctggccggcaaggaaaacctggaataccctagcgtgaccctgccacctcagcctcacaccaaggagggcgttgatgcctacaacgaagtgatcgcccgggtgcgaatgtgggtgaacctgaacctgtggcagaagctgaagctaagcagagatgatgccaagcctctgctgagactgaagggattcccttcctttcctctggtcgagagacaggccaacgaagtggactggtgggacatggtgtgtaacgtgaagaagctgatcaacgagaaaaaggaggatggcaaggtgttttggcagaatctggctggctacaagagacaggaagccctgagaccatacctgagcagcgaggaagatcggaagaagggaaagaaattcgctcggtaccagctgggcgacctgctgctgcacctggaaaagaagcacggcgaggactggggaaaggtgtacgacgaggcctgggagcggattgacaagaaagtggaaggcctgagcaagcacatcaagctggaagaggaacggagaagcgaggacgcccagagcaaggccgccctgaccgactggctgcgggctaaggccagcttcgtgatcgagggcctgaaggaggccgacaaggacgagttctgcagatgcgagctgaagctgcagaagtggtacggggacctgcggggaaagcccttcgccatcgaagccgagaacagcatcctggacatcagcggcttcagcaagcagtacaactgtgccttcatctggcagaaggacggcgtgaagaagctgaacctgtacctgatcatcaactacttcaagggcggcaagctgcggttcaagaagatcaaacctgaagccttcgaagccaacagattctacaccgtgatcaacaaaaagagcggcgagatcgtgcccatggaggtgaacttcaacttcgacgaccccaacctgatcatcctgcctctggcctttggcaagagacagggcagagaattcatctggaacgacctgctgtccctggaaaccggcagcctgaagctggccaacggaagagtgatcgagaagacactgtacaacagaagaacccggcaggatgagcctgccctgttcgtggccctgaccttcgagcggcgggaggtcctggactcctccaatatcaaaccaatgaacctgatcggcgtggcaagaggcgaaaacatccccgccgtgatcgccctgaccgaccccgagggctgcccactgagccggtttaaggatagcctgggaaacccaacccacatcctgagaatcggcgagagctataaggagaagcagcggaccatccaggccaagaaggaggtggagcagcggagagccggcggctacagccggaagtacgccagcaaagccaagaatctggcagacgatatggtgagaaacaccgctagagatctgctgtactacgccgtgacccaggatgccatgctgatcttcgccaacctgagccggggcttcggccggcagggcaagcggaccttcatggccgagagacagtacacacggatggaggactggctgaccgccaagctggcctacgagggcctgagcaagacctacctgtccaagacactggcccagtacacctccaagacatgcagcaactgtgggtttaccatcaccagcgccgactacgacagggtgctggagaagctgaagaagacagcaacaggctggatgaccacaattaacggcaaggagctgaaggtggagggccagattacctactacaacagatacaagagacagaacgtagtcaaggacctgtccgtcgagctggatagactgagcgaagaatctgtgaacaacgacatctcctcctggacaaagggcagaagcggagaagctctgagcctcctgaagaaaagattctcccatagacccgtgcaggagaagttcgtgtgcctgaactgcggcttcgagacacacgcagccgagcaagccgccctgaacatcgccagatcctggctgttcctgcggagccaggagtacaagaaataccagacaaacaagacaaccggcaacaccgataagagagccttcgtcgagacctggcagtccttttaccggaagaagcttaaggaggtgtggaaacctgccgtgcggtctggcggatctggcggaggctcctcaggacgtggtgacattcaaggacgtcgccatctacttcagccctgaggaatgggtgcggctgagcgccggacagagagaactgtaccaggaggtgatgctggacaactacgagctggtgaccagcctggatagagagagcaaactgctgtataagatggaccccgaggaagaaagctgcgagggcgtgccatacagctctgccgacagcggcgcccctgatagctcctccacctctgcttgtggatctggctccggcagcggccccaagaaaaagagaaaagtctaagctgccttctgcggggcttgccttctggccatgcccttcttctctcccttgcacctgtacctcttggtctttgaataaagcctgagtaggaaggctagcaaaaaaaaaaaaaaaaaaaaaaaaaaaaaaaaaaaaaaaaaaaaaaaaaaaaaaaaaaaaaaaaaaaaaaaaaaaaaaaa

SEQ ID NO: 18559 - RNA, 9512 nt, synthetic construct
  source 1..9512: mol_type = other RNA
aggaaataagagagaaaagaagagtaagaagaaatataagagccaccatggcccctaagaagaagcgtaaagtgagccggatggaacgcctcgtctacgaggtgcggcagaagtgcagaaacatcgaggacatctgcatctcctgcggatctctgaacgtgaccctggagcacccactgttcatcggcggcatgtgccagaactgtaaaaactgttttctggagtgtgcctatcaatacgacgatgacggctaccagagctactgcaccatctgttgcggcggaagagaggtgctgatgtgtggaaataacaactgctgccggtgcttctgcgtggaatgcgtggacctgctggtgggccccggcgccgcccaggccgctattaaggaagatccttggaactgctacatgtgcggccacaagggcacatacggcctgctgagacggagagaggactggcctagcagactgcagatgttcttcgccaataaccacgaccaggagttcgacccccctaaggtgtaccctcccgtccccgccgagaagagaaagcccatccgggtcctgagcctgttcgatggcatcgccaccggtctgctggtgctgaaggacctgggcatccaggtggataggtacattgcctccgaggtgtgcgaggactccatcaccgtgggaatggtgcgtcatcagggcaagatcatgtacgtgggcgacgtgcggagcgtgacacagaagcatatccaggagtggggccctttcgacctggtgatcggcggcagcccttgcaatgacctgagcatcgtgaacccagcccggaagggcctgtacgagggaaccggcagactgttcttcgagttttacagactgctgcacgacgcccggcctaaggaaggcgacgaccggcccttcttttggctgttcgagaatgtggtggccatgggagtcagcgacaagcgggatattagccggttcctggagagcaaccccgtgatgatcgatgccaaggaagtgagcgccgcccaccgggccagatacttctggggcaatctgcctggcatgaacagacccctggccagcaccgtgaacgacaagctggagctgcaggagtgcctggagcacggccggatcgccaagttcagcaaggtgagaaccatcaccacccgaagcaacagcatcaaacaaggcaaggaccagcactttcctgtgttcatgaacgagaaggaggacatcctgtggtgtaccgagatggagagagtgttcgggttcccagtccactacacagatgtcagcaacatgtctagactggccagacagagactgctgggaagaagctggtccgtccctgtgatcagacacctgttcgcccctctgaaggagtacttcgcctgcgtgagcagcggcaacagcaacgccaacagccggggccccagcttctctagcggcctggtgccactgtccctgagagggagccacatgggccccatggagatctacaaaaccgtgagcgcctggaagcggcagcctgtgcgcgtgctgagcctgtttcggaatatcgataaagtcctgaaaagcctgggattcctggagagcggctctggctccggcggtggcaccctgaagtacgtggaggatgtgacaaacgtggtcagacgggatgtggagaagtggggccccttcgatctggtgtacggcagcacccaacccctgggcagctcttgtgaccggtgccctggctggtacatgtttcagttccaccggatcctgcagtacgccctgccgagacaggagtcccagcggccattcttttggattttcatggacaacttgctgctgaccgaggatgaccaggaaactaccactcggttcctgcagaccgaagccgtgaccctgcaggacgtgagaggccgggactaccagaacgccatgcgggtgtggtccaacatccctggactgaaaagcaagcacgcacctctgacccctaaagaagaggagtacctgcaggcccaggtgcggagcagaagcaagctggacgcccctaaggtggatctgctggtgaagaattgcctcctgcccctgagagagtacttcaagtatttcagccagaatagtctgcccctgggaggcagcggcggcggcgccctggtgacatttgaggacgtcgccgtgcggttcacccaggaggaatgggctctgctggatccttctcagaaaatcctgtaccgggacgtgatgagagagacataccggaatctgacctccgtgggcatcaactgggaatgttgggaccttgaagcctgcttcagaagcctgggaagaaacctgagagtgcaggtggtgaagagaaagtgcgagctgaccaacagcggcccctgcgccgagggcggcccaagcagcggcgcccctcctcccagcggcggcagcccagccggctccccaacctctaccgaggagggcacctctgagtccgccacccccgagagcggccctggcacctccaccgagcccagcgagggcagcgcacccggcagccctgccggcagccccacctccacagaggagggaaccagcaccgagcccagcgaaggcagcgccccaggcaccagcaccgagcctagtgagcaggagattaaacggatcaacaagatcagaagaagacttgtgaaagacagcaacaccaagaaggccggcaagacaggccccatgaaaaccctgctggttagagtgatgacacccgatctgagagagcggctggaaaacctgagaaagaagcctgaaaatatcccccagcccatcagcaatacatctagagccaacctgaataagctgctgaccgattacaccgaaatgaagaaggcgatcctgcatgtgtactgggaagagttccagaaggaccctgtgggcctgatgagccgggtggcccagcctgccagcaagaagatcgatcagaacaagctgaaacctgagatggacgagaagggcaacctgaccaccgccggctttgcctgctctcagtgtggccagcccctgttcgtgtacaagctggagcaggtgtctgagaagggcaaggcttacaccaactacttcggacggtgcaatgtggccgagcacgaaaagctgatcctgctggcccagctgaagcccgagaaggatagcgacgaagccgtgacatatagcctgggaaagtttgggcagagggccctggatttctacagcattcatgtgaccaaggagtccacccaccccgtgaagcccctggcccagatcgccggaaacagatacgcctccggacctgtgggaaaggccctgagcgacgcatgtatgggcacaatcgcctccttcctgtctaagtaccaggacatcatcatcgaacaccagaaggtggtgaagggcaaccagaagagactggagagcctgcgggagctggccggcaaggaaaacctggaataccctagcgtgaccctgccacctcagcctcacaccaaggagggcgttgatgcctacaacgaagtgatcgcccgggtgcgaatgtgggtgaacctgaacctgtggcagaagctgaagctaagcagagatgatgccaagcctctgctgagactgaagggattcccttcctttcctctggtcgagagacaggccaacgaagtggactggtgggacatggtgtgtaacgtgaagaagctgatcaacgagaaaaaggaggatggcaaggtgttttggcagaatctggctggctacaagagacaggaagccctgagaccatacctgagcagcgaggaagatcggaagaagggaaagaaattcgctcggtaccagctgggcgacctgctgctgcacctggaaaagaagcacggcgaggactggggaaaggtgtacgacgaggcctgggagcggattgacaagaaagtggaaggcctgagcaagcacatcaagctggaagaggaacggagaagcgaggacgcccagagcaaggccgccctgaccgactggctgcgggctaaggccagcttcgtgatcgagggcctgaaggaggccgacaaggacgagttctgcagatgcgagctgaagctgcagaagtggtacggggacctgcggggaaagcccttcgccatcgaagccgagaacagcatcctggacatcagcggcttcagcaagcagtacaactgtgccttcatctggcagaaggacggcgtgaagaagctgaacctgtacctgatcatcaactacttcaagggcggcaagctgcggttcaagaagatcaaacctgaagccttcgaagccaacagattctacaccgtgatcaacaaaaagagcggcgagatcgtgcccatggaggtgaacttcaacttcgacgaccccaacctgatcatcctgcctctggcctttggcaagagacagggcagagaattcatctggaacgacctgctgtccctggaaaccggcagcctgaagctggccaacggaagagtgatcgagaagacactgtacaacagaagaacccggcaggatgagcctgccctgttcgtggccctgaccttcgagcggcgggaggtcctggactcctccaatatcaaaccaatgaacctgatcggcgtggcaagaggcgaaaacatccccgccgtgatcgccctgaccgaccccgagggctgcccactgagccggtttaaggatagcctgggaaacccaacccacatcctgagaatcggcgagagctataaggagaagcagcggaccatccaggccaagaaggaggtggagcagcggagagccggcggctacagccggaagtacgccagcaaagccaagaatctggcagacgatatggtgagaaacaccgctagagatctgctgtactacgccgtgacccaggatgccatgctgatcttcgccaacctgagccggggcttcggccggcagggcaagcggaccttcatggccgagagacagtacacacggatggaggactggctgaccgccaagctggcctacgagggcctgagcaagacctacctgtccaagacactggcccagtacacctccaagacatgcagcaactgtgggtttaccatcaccagcgccgactacgacagggtgctggagaagctgaagaagacagcaacaggctggatgaccacaattaacggcaaggagctgaaggtggagggccagattacctactacaacagatacaagagacagaacgtagtcaaggacctgtccgtcgagctggatagactgagcgaagaatctgtgaacaacgacatctcctcctggacaaagggcagaagcggagaagctctgagcctcctgaagaaaagattctcccatagacccgtgcaggagaagttcgtgtgcctgaactgcggcttcgagacacacgcagccgagcaagccgccctgaacatcgccagatcctggctgttcctgcggagccaggagtacaagaaataccagacaaacaagacaaccggcaacaccgataagagagccttcgtcgagacctggcagtccttttaccggaagaagcttaaggaggtgtggaaacctgccgtgcggtctggcggatctggcggaggctccctgctgaccttcgaggacgtcgccgtgtccttcagcgaggaagaatgggagctgctcgatcctcctcagaaaaccctgtacaacgacgtgatgcaagagaactacgagacagtgatctctctgggcctgaagctgaagaacgacaccggaaatgatcagcccatcagcatcagcgccctggaaatgcaggccagcggcagcaaggtgctgcggaaggccagaatgaaagtggctcagaagacaggcggcccaagcagcggcgcccctcctcccagcggcggcagcccagccggctccccaacctctaccgaggagggcacctctgagtccgccacccccgagagcggccctggcacctccaccgagcccagcgagggcagcgcacccggcagccctgccggcagccccacctccacagaggagggaaccagcaccgagcccagcgaaggcagcgccccaggcaccagcaccgagcctagtgagcaggagattaaacggatcaacaagatcagaagaagacttgtgaaagacagcaacaccaagaaggccggcaagacaggccccatgaaaaccctgctggttagagtgatgacacccgatctgagagagcggctggaaaacctgagaaagaagcctgaaaatatcccccagcccatcagcaatacatctagagccaacctgaataagctgctgaccgattacaccgaaatgaagaaggcgatcctgcatgtgtactgggaagagttccagaaggaccctgtgggcctgatgagccgggtggcccagcctgccagcaagaagatcgatcagaacaagctgaaacctgagatggacgagaagggcaacctgaccaccgccggctttgcctgctctcagtgtggccagcccctgttcgtgtacaagctggagcaggtgtctgagaagggcaaggcttacaccaactacttcggacggtgcaatgtggccgagcacgaaaagctgatcctgctggcccagctgaagcccgagaaggatagcgacgaagccgtgacatatagcctgggaaagtttgggcagagggccctggatttctacagcattcatgtgaccaaggagtccacccaccccgtgaagcccctggcccagatcgccggaaacagatacgcctccggacctgtgggaaaggccctgagcgacgcatgtatgggcacaatcgcctccttcctgtctaagtaccaggacatcatcatcgaacaccagaaggtggtgaagggcaaccagaagagactggagagcctgcgggagctggccggcaaggaaaacctggaataccctagcgtgaccctgccacctcagcctcacaccaaggagggcgttgatgcctacaacgaagtgatcgcccgggtgcgaatgtgggtgaacctgaacctgtggcagaagctgaagctaagcagagatgatgccaagcctctgctgagactgaagggattcccttcctttcctctggtcgagagacaggccaacgaagtggactggtgggacatggtgtgtaacgtgaagaagctgatcaacgagaaaaaggaggatggcaaggtgttttggcagaatctggctggctacaagagacaggaagccctgagaccatacctgagcagcgaggaagatcggaagaagggaaagaaattcgctcggtaccagctgggcgacctgctgctgcacctggaaaagaagcacggcgaggactggggaaaggtgtacgacgaggcctgggagcggattgacaagaaagtggaaggcctgagcaagcacatcaagctggaagaggaacggagaagcgaggacgcccagagcaaggccgccctgaccgactggctgcgggctaaggccagcttcgtgatcgagggcctgaaggaggccgacaaggacgagttctgcagatgcgagctgaagctgcagaagtggtacggggacctgcggggaaagcccttcgccatcgaagccgagaacagcatcctggacatcagcggcttcagcaagcagtacaactgtgccttcatctggcagaaggacggcgtgaagaagctgaacctgtacctgatcatcaactacttcaagggcggcaagctgcggttcaagaagatcaaacctgaagccttcgaagccaacagattctacaccgtgatcaacaaaaagagcggcgagatcgtgcccatggaggtgaacttcaacttcgacgaccccaacctgatcatcctgcctctggcctttggcaagagacagggcagagaattcatctggaacgacctgctgtccctggaaaccggcagcctgaagctggccaacggaagagtgatcgagaagacactgtacaacagaagaacccggcaggatgagcctgccctgttcgtggccctgaccttcgagcggcgggaggtcctggactcctccaatatcaaaccaatgaacctgatcggcgtggcaagaggcgaaaacatccccgccgtgatcgccctgaccgaccccgagggctgcccactgagccggtttaaggatagcctgggaaacccaacccacatcctgagaatcggcgagagctataaggagaagcagcggaccatccaggccaagaaggaggtggagcagcggagagccggcggctacagccggaagtacgccagcaaagccaagaatctggcagacgatatggtgagaaacaccgctagagatctgctgtactacgccgtgacccaggatgccatgctgatcttcgccaacctgagccggggcttcggccggcagggcaagcggaccttcatggccgagagacagtacacacggatggaggactggctgaccgccaagctggcctacgagggcctgagcaagacctacctgtccaagacactggcccagtacacctccaagacatgcagcaactgtgggtttaccatcaccagcgccgactacgacagggtgctggagaagctgaagaagacagcaacaggctggatgaccacaattaacggcaaggagctgaaggtggagggccagattacctactacaacagatacaagagacagaacgtagtcaaggacctgtccgtcgagctggatagactgagcgaagaatctgtgaacaacgacatctcctcctggacaaagggcagaagcggagaagctctgagcctcctgaagaaaagattctcccatagacccgtgcaggagaagttcgtgtgcctgaactgcggcttcgagacacacgcagccgagcaagccgccctgaacatcgccagatcctggctgttcctgcggagccaggagtacaagaaataccagacaaacaagacaaccggcaacaccgataagagagccttcgtcgagacctggcagtccttttaccggaagaagcttaaggaggtgtggaaacctgccgtgcggtctggcggatctggcggaggctcctgtcgccttccgggacgtgatcgtggacttcacccaggaggaatggcagcagctgaagcctgctcaaaaggacctgtacagagatgtgatgatggaaatctactggaatctggtgtctctggacctggaaaccgagggagatatgaacgagcctgaccccgagaaagacagctgggaggatagaacaagcatcgtggttgtggaaggcctgatgcggaacggcgcccagggctacgcctgcgagaaggccggcatccagggctgtagagtgggatctggctccggcagcggccccaagaaaaagagaaaagtctaagctgccttctgcggggcttgccttctggccatgcccttcttctctcccttgcacctgtacctcttggtctttgaataaagcctgagtaggaaggctagcaaaaaaaaaaaaaaaaaaaaaaaaaaaaaaaaaaaaaaaaaaaaaaaaaaaaaaaaaaaaaaaaaaaaaaaaaaaaaaaa

SEQ ID NO: 18560 - RNA, 9494 nt, synthetic construct
  source 1..9494: mol_type = other RNA
aggaaataagagagaaaagaagagtaagaagaaatataagagccaccatggcccctaagaagaagcgtaaagtgagccggatggaacgcctcgtctacgaggtgcggcagaagtgcagaaacatcgaggacatctgcatctcctgcggatctctgaacgtgaccctggagcacccactgttcatcggcggcatgtgccagaactgtaaaaactgttttctggagtgtgcctatcaatacgacgatgacggctaccagagctactgcaccatctgttgcggcggaagagaggtgctgatgtgtggaaataacaactgctgccggtgcttctgcgtggaatgcgtggacctgctggtgggccccggcgccgcccaggccgctattaaggaagatccttggaactgctacatgtgcggccacaagggcacatacggcctgctgagacggagagaggactggcctagcagactgcagatgttcttcgccaataaccacgaccaggagttcgacccccctaaggtgtaccctcccgtccccgccgagaagagaaagcccatccgggtcctgagcctgttcgatggcatcgccaccggtctgctggtgctgaaggacctgggcatccaggtggataggtacattgcctccgaggtgtgcgaggactccatcaccgtgggaatggtgcgtcatcagggcaagatcatgtacgtgggcgacgtgcggagcgtgacacagaagcatatccaggagtggggccctttcgacctggtgatcggcggcagcccttgcaatgacctgagcatcgtgaacccagcccggaagggcctgtacgagggaaccggcagactgttcttcgagttttacagactgctgcacgacgcccggcctaaggaaggcgacgaccggcccttcttttggctgttcgagaatgtggtggccatgggagtcagcgacaagcgggatattagccggttcctggagagcaaccccgtgatgatcgatgccaaggaagtgagcgccgcccaccgggccagatacttctggggcaatctgcctggcatgaacagacccctggccagcaccgtgaacgacaagctggagctgcaggagtgcctggagcacggccggatcgccaagttcagcaaggtgagaaccatcaccacccgaagcaacagcatcaaacaaggcaaggaccagcactttcctgtgttcatgaacgagaaggaggacatcctgtggtgtaccgagatggagagagtgttcgggttcccagtccactacacagatgtcagcaacatgtctagactggccagacagagactgctgggaagaagctggtccgtccctgtgatcagacacctgttcgcccctctgaaggagtacttcgcctgcgtgagcagcggcaacagcaacgccaacagccggggccccagcttctctagcggcctggtgccactgtccctgagagggagccacatgggccccatggagatctacaaaaccgtgagcgcctggaagcggcagcctgtgcgcgtgctgagcctgtttcggaatatcgataaagtcctgaaaagcctgggattcctggagagcggctctggctccggcggtggcaccctgaagtacgtggaggatgtgacaaacgtggtcagacgggatgtggagaagtggggccccttcgatctggtgtacggcagcacccaacccctgggcagctcttgtgaccggtgccctggctggtacatgtttcagttccaccggatcctgcagtacgccctgccgagacaggagtcccagcggccattcttttggattttcatggacaacttgctgctgaccgaggatgaccaggaaactaccactcggttcctgcagaccgaagccgtgaccctgcaggacgtgagaggccgggactaccagaacgccatgcgggtgtggtccaacatccctggactgaaaagcaagcacgcacctctgacccctaaagaagaggagtacctgcaggcccaggtgcggagcagaagcaagctggacgcccctaaggtggatctgctggtgaagaattgcctcctgcccctgagagagtacttcaagtatttcagccagaatagtctgcccctgggaggcagcggcggcggcgccctggtgacatttgaggacgtcgccgtgcggttcacccaggaggaatgggctctgctggatccttctcagaaaatcctgtaccgggacgtgatgagagagacataccggaatctgacctccgtgggcatcaactgggaatgttgggaccttgaagcctgcttcagaagcctgggaagaaacctgagagtgcaggtggtgaagagaaagtgcgagctgaccaacagcggcccctgcgccgagggcggcccaagcagcggcgcccctcctcccagcggcggcagcccagccggctccccaacctctaccgaggagggcacctctgagtccgccacccccgagagcggccctggcacctccaccgagcccagcgagggcagcgcacccggcagccctgccggcagccccacctccacagaggagggaaccagcaccgagcccagcgaaggcagcgccccaggcaccagcaccgagcctagtgagcaggagattaaacggatcaacaagatcagaagaagacttgtgaaagacagcaacaccaagaaggccggcaagacaggccccatgaaaaccctgctggttagagtgatgacacccgatctgagagagcggctggaaaacctgagaaagaagcctgaaaatatcccccagcccatcagcaatacatctagagccaacctgaataagctgctgaccgattacaccgaaatgaagaaggcgatcctgcatgtgtactgggaagagttccagaaggaccctgtgggcctgatgagccgggtggcccagcctgccagcaagaagatcgatcagaacaagctgaaacctgagatggacgagaagggcaacctgaccaccgccggctttgcctgctctcagtgtggccagcccctgttcgtgtacaagctggagcaggtgtctgagaagggcaaggcttacaccaactacttcggacggtgcaatgtggccgagcacgaaaagctgatcctgctggcccagctgaagcccgagaaggatagcgacgaagccgtgacatatagcctgggaaagtttgggcagagggccctggatttctacagcattcatgtgaccaaggagtccacccaccccgtgaagcccctggcccagatcgccggaaacagatacgcctccggacctgtgggaaaggccctgagcgacgcatgtatgggcacaatcgcctccttcctgtctaagtaccaggacatcatcatcgaacaccagaaggtggtgaagggcaaccagaagagactggagagcctgcgggagctggccggcaaggaaaacctggaataccctagcgtgaccctgccacctcagcctcacaccaaggagggcgttgatgcctacaacgaagtgatcgcccgggtgcgaatgtgggtgaacctgaacctgtggcagaagctgaagctaagcagagatgatgccaagcctctgctgagactgaagggattcccttcctttcctctggtcgagagacaggccaacgaagtggactggtgggacatggtgtgtaacgtgaagaagctgatcaacgagaaaaaggaggatggcaaggtgttttggcagaatctggctggctacaagagacaggaagccctgagaccatacctgagcagcgaggaagatcggaagaagggaaagaaattcgctcggtaccagctgggcgacctgctgctgcacctggaaaagaagcacggcgaggactggggaaaggtgtacgacgaggcctgggagcggattgacaagaaagtggaaggcctgagcaagcacatcaagctggaagaggaacggagaagcgaggacgcccagagcaaggccgccctgaccgactggctgcgggctaaggccagcttcgtgatcgagggcctgaaggaggccgacaaggacgagttctgcagatgcgagctgaagctgcagaagtggtacggggacctgcggggaaagcccttcgccatcgaagccgagaacagcatcctggacatcagcggcttcagcaagcagtacaactgtgccttcatctggcagaaggacggcgtgaagaagctgaacctgtacctgatcatcaactacttcaagggcggcaagctgcggttcaagaagatcaaacctgaagccttcgaagccaacagattctacaccgtgatcaacaaaaagagcggcgagatcgtgcccatggaggtgaacttcaacttcgacgaccccaacctgatcatcctgcctctggcctttggcaagagacagggcagagaattcatctggaacgacctgctgtccctggaaaccggcagcctgaagctggccaacggaagagtgatcgagaagacactgtacaacagaagaacccggcaggatgagcctgccctgttcgtggccctgaccttcgagcggcgggaggtcctggactcctccaatatcaaaccaatgaacctgatcggcgtggcaagaggcgaaaacatccccgccgtgatcgccctgaccgaccccgagggctgcccactgagccggtttaaggatagcctgggaaacccaacccacatcctgagaatcggcgagagctataaggagaagcagcggaccatccaggccaagaaggaggtggagcagcggagagccggcggctacagccggaagtacgccagcaaagccaagaatctggcagacgatatggtgagaaacaccgctagagatctgctgtactacgccgtgacccaggatgccatgctgatcttcgccaacctgagccggggcttcggccggcagggcaagcggaccttcatggccgagagacagtacacacggatggaggactggctgaccgccaagctggcctacgagggcctgagcaagacctacctgtccaagacactggcccagtacacctccaagacatgcagcaactgtgggtttaccatcaccagcgccgactacgacagggtgctggagaagctgaagaagacagcaacaggctggatgaccacaattaacggcaaggagctgaaggtggagggccagattacctactacaacagatacaagagacagaacgtagtcaaggacctgtccgtcgagctggatagactgagcgaagaatctgtgaacaacgacatctcctcctggacaaagggcagaagcggagaagctctgagcctcctgaagaaaagattctcccatagacccgtgcaggagaagttcgtgtgcctgaactgcggcttcgagacacacgcagccgagcaagccgccctgaacatcgccagatcctggctgttcctgcggagccaggagtacaagaaataccagacaaacaagacaaccggcaacaccgataagagagccttcgtcgagacctggcagtccttttaccggaagaagcttaaggaggtgtggaaacctgccgtgcggtctggcggatctggcggaggctccctgctgaccttcgaggacgtcgccgtgtccttcagcgaggaagaatgggagctgctcgatcctcctcagaaaaccctgtacaacgacgtgatgcaagagaactacgagacagtgatctctctgggcctgaagctgaagaacgacaccggaaatgatcagcccatcagcatcagcgccctggaaatgcaggccagcggcagcaaggtgctgcggaaggccagaatgaaagtggctcagaagacaggcggcccaagcagcggcgcccctcctcccagcggcggcagcccagccggctccccaacctctaccgaggagggcacctctgagtccgccacccccgagagcggccctggcacctccaccgagcccagcgagggcagcgcacccggcagccctgccggcagccccacctccacagaggagggaaccagcaccgagcccagcgaaggcagcgccccaggcaccagcaccgagcctagtgagcaggagattaaacggatcaacaagatcagaagaagacttgtgaaagacagcaacaccaagaaggccggcaagacaggccccatgaaaaccctgctggttagagtgatgacacccgatctgagagagcggctggaaaacctgagaaagaagcctgaaaatatcccccagcccatcagcaatacatctagagccaacctgaataagctgctgaccgattacaccgaaatgaagaaggcgatcctgcatgtgtactgggaagagttccagaaggaccctgtgggcctgatgagccgggtggcccagcctgccagcaagaagatcgatcagaacaagctgaaacctgagatggacgagaagggcaacctgaccaccgccggctttgcctgctctcagtgtggccagcccctgttcgtgtacaagctggagcaggtgtctgagaagggcaaggcttacaccaactacttcggacggtgcaatgtggccgagcacgaaaagctgatcctgctggcccagctgaagcccgagaaggatagcgacgaagccgtgacatatagcctgggaaagtttgggcagagggccctggatttctacagcattcatgtgaccaaggagtccacccaccccgtgaagcccctggcccagatcgccggaaacagatacgcctccggacctgtgggaaaggccctgagcgacgcatgtatgggcacaatcgcctccttcctgtctaagtaccaggacatcatcatcgaacaccagaaggtggtgaagggcaaccagaagagactggagagcctgcgggagctggccggcaaggaaaacctggaataccctagcgtgaccctgccacctcagcctcacaccaaggagggcgttgatgcctacaacgaagtgatcgcccgggtgcgaatgtgggtgaacctgaacctgtggcagaagctgaagctaagcagagatgatgccaagcctctgctgagactgaagggattcccttcctttcctctggtcgagagacaggccaacgaagtggactggtgggacatggtgtgtaacgtgaagaagctgatcaacgagaaaaaggaggatggcaaggtgttttggcagaatctggctggctacaagagacaggaagccctgagaccatacctgagcagcgaggaagatcggaagaagggaaagaaattcgctcggtaccagctgggcgacctgctgctgcacctggaaaagaagcacggcgaggactggggaaaggtgtacgacgaggcctgggagcggattgacaagaaagtggaaggcctgagcaagcacatcaagctggaagaggaacggagaagcgaggacgcccagagcaaggccgccctgaccgactggctgcgggctaaggccagcttcgtgatcgagggcctgaaggaggccgacaaggacgagttctgcagatgcgagctgaagctgcagaagtggtacggggacctgcggggaaagcccttcgccatcgaagccgagaacagcatcctggacatcagcggcttcagcaagcagtacaactgtgccttcatctggcagaaggacggcgtgaagaagctgaacctgtacctgatcatcaactacttcaagggcggcaagctgcggttcaagaagatcaaacctgaagccttcgaagccaacagattctacaccgtgatcaacaaaaagagcggcgagatcgtgcccatggaggtgaacttcaacttcgacgaccccaacctgatcatcctgcctctggcctttggcaagagacagggcagagaattcatctggaacgacctgctgtccctggaaaccggcagcctgaagctggccaacggaagagtgatcgagaagacactgtacaacagaagaacccggcaggatgagcctgccctgttcgtggccctgaccttcgagcggcgggaggtcctggactcctccaatatcaaaccaatgaacctgatcggcgtggcaagaggcgaaaacatccccgccgtgatcgccctgaccgaccccgagggctgcccactgagccggtttaaggatagcctgggaaacccaacccacatcctgagaatcggcgagagctataaggagaagcagcggaccatccaggccaagaaggaggtggagcagcggagagccggcggctacagccggaagtacgccagcaaagccaagaatctggcagacgatatggtgagaaacaccgctagagatctgctgtactacgccgtgacccaggatgccatgctgatcttcgccaacctgagccggggcttcggccggcagggcaagcggaccttcatggccgagagacagtacacacggatggaggactggctgaccgccaagctggcctacgagggcctgagcaagacctacctgtccaagacactggcccagtacacctccaagacatgcagcaactgtgggtttaccatcaccagcgccgactacgacagggtgctggagaagctgaagaagacagcaacaggctggatgaccacaattaacggcaaggagctgaaggtggagggccagattacctactacaacagatacaagagacagaacgtagtcaaggacctgtccgtcgagctggatagactgagcgaagaatctgtgaacaacgacatctcctcctggacaaagggcagaagcggagaagctctgagcctcctgaagaaaagattctcccatagacccgtgcaggagaagttcgtgtgcctgaactgcggcttcgagacacacgcagccgagcaagccgccctgaacatcgccagatcctggctgttcctgcggagccaggagtacaagaaataccagacaaacaagacaaccggcaacaccgataagagagccttcgtcgagacctggcagtccttttaccggaagaagcttaaggaggtgtggaaacctgccgtgcggtctggcggatctggcggaggctcctgtgacctacaacgacgtgcacgtggacatcacccaggaggaatgggctctgatggaccccagccagcggaacctgtacaaggatgtgatggtcgagacatacatgaacctgaccgccatcggatataattgggagaacctggaagtggaagaaccatgtcagaaccccctgaagcacggcagacacgagagacctcatacaggcgagaaaccttacgagtacaatcagtgcggcaaggccttcgcccaacctggatctggctccggcagcggccccaagaaaaagagaaaagtctaagctgccttctgcggggcttgccttctggccatgcccttcttctctcccttgcacctgtacctcttggtctttgaataaagcctgagtaggaaggctagcaaaaaaaaaaaaaaaaaaaaaaaaaaaaaaaaaaaaaaaaaaaaaaaaaaaaaaaaaaaaaaaaaaaaaaaaaaaaaaaa

SEQ ID NO: 18561 - RNA, 9485 nt, synthetic construct
  source 1..9485: mol_type = other RNA
aggaaataagagagaaaagaagagtaagaagaaatataagagccaccatggcccctaagaagaagcgtaaagtgagccggatggaacgcctcgtctacgaggtgcggcagaagtgcagaaacatcgaggacatctgcatctcctgcggatctctgaacgtgaccctggagcacccactgttcatcggcggcatgtgccagaactgtaaaaactgttttctggagtgtgcctatcaatacgacgatgacggctaccagagctactgcaccatctgttgcggcggaagagaggtgctgatgtgtggaaataacaactgctgccggtgcttctgcgtggaatgcgtggacctgctggtgggccccggcgccgcccaggccgctattaaggaagatccttggaactgctacatgtgcggccacaagggcacatacggcctgctgagacggagagaggactggcctagcagactgcagatgttcttcgccaataaccacgaccaggagttcgacccccctaaggtgtaccctcccgtccccgccgagaagagaaagcccatccgggtcctgagcctgttcgatggcatcgccaccggtctgctggtgctgaaggacctgggcatccaggtggataggtacattgcctccgaggtgtgcgaggactccatcaccgtgggaatggtgcgtcatcagggcaagatcatgtacgtgggcgacgtgcggagcgtgacacagaagcatatccaggagtggggccctttcgacctggtgatcggcggcagcccttgcaatgacctgagcatcgtgaacccagcccggaagggcctgtacgagggaaccggcagactgttcttcgagttttacagactgctgcacgacgcccggcctaaggaaggcgacgaccggcccttcttttggctgttcgagaatgtggtggccatgggagtcagcgacaagcgggatattagccggttcctggagagcaaccccgtgatgatcgatgccaaggaagtgagcgccgcccaccgggccagatacttctggggcaatctgcctggcatgaacagacccctggccagcaccgtgaacgacaagctggagctgcaggagtgcctggagcacggccggatcgccaagttcagcaaggtgagaaccatcaccacccgaagcaacagcatcaaacaaggcaaggaccagcactttcctgtgttcatgaacgagaaggaggacatcctgtggtgtaccgagatggagagagtgttcgggttcccagtccactacacagatgtcagcaacatgtctagactggccagacagagactgctgggaagaagctggtccgtccctgtgatcagacacctgttcgcccctctgaaggagtacttcgcctgcgtgagcagcggcaacagcaacgccaacagccggggccccagcttctctagcggcctggtgccactgtccctgagagggagccacatgggccccatggagatctacaaaaccgtgagcgcctggaagcggcagcctgtgcgcgtgctgagcctgtttcggaatatcgataaagtcctgaaaagcctgggattcctggagagcggctctggctccggcggtggcaccctgaagtacgtggaggatgtgacaaacgtggtcagacgggatgtggagaagtggggccccttcgatctggtgtacggcagcacccaacccctgggcagctcttgtgaccggtgccctggctggtacatgtttcagttccaccggatcctgcagtacgccctgccgagacaggagtcccagcggccattcttttggattttcatggacaacttgctgctgaccgaggatgaccaggaaactaccactcggttcctgcagaccgaagccgtgaccctgcaggacgtgagaggccgggactaccagaacgccatgcgggtgtggtccaacatccctggactgaaaagcaagcacgcacctctgacccctaaagaagaggagtacctgcaggcccaggtgcggagcagaagcaagctggacgcccctaaggtggatctgctggtgaagaattgcctcctgcccctgagagagtacttcaagtatttcagccagaatagtctgcccctgggaggcagcggcggcggcgccctggtgacatttgaggacgtcgccgtgcggttcacccaggaggaatgggctctgctggatccttctcagaaaatcctgtaccgggacgtgatgagagagacataccggaatctgacctccgtgggcatcaactgggaatgttgggaccttgaagcctgcttcagaagcctgggaagaaacctgagagtgcaggtggtgaagagaaagtgcgagctgaccaacagcggcccctgcgccgagggcggcccaagcagcggcgcccctcctcccagcggcggcagcccagccggctccccaacctctaccgaggagggcacctctgagtccgccacccccgagagcggccctggcacctccaccgagcccagcgagggcagcgcacccggcagccctgccggcagccccacctccacagaggagggaaccagcaccgagcccagcgaaggcagcgccccaggcaccagcaccgagcctagtgagcaggagattaaacggatcaacaagatcagaagaagacttgtgaaagacagcaacaccaagaaggccggcaagacaggccccatgaaaaccctgctggttagagtgatgacacccgatctgagagagcggctggaaaacctgagaaagaagcctgaaaatatcccccagcccatcagcaatacatctagagccaacctgaataagctgctgaccgattacaccgaaatgaagaaggcgatcctgcatgtgtactgggaagagttccagaaggaccctgtgggcctgatgagccgggtggcccagcctgccagcaagaagatcgatcagaacaagctgaaacctgagatggacgagaagggcaacctgaccaccgccggctttgcctgctctcagtgtggccagcccctgttcgtgtacaagctggagcaggtgtctgagaagggcaaggcttacaccaactacttcggacggtgcaatgtggccgagcacgaaaagctgatcctgctggcccagctgaagcccgagaaggatagcgacgaagccgtgacatatagcctgggaaagtttgggcagagggccctggatttctacagcattcatgtgaccaaggagtccacccaccccgtgaagcccctggcccagatcgccggaaacagatacgcctccggacctgtgggaaaggccctgagcgacgcatgtatgggcacaatcgcctccttcctgtctaagtaccaggacatcatcatcgaacaccagaaggtggtgaagggcaaccagaagagactggagagcctgcgggagctggccggcaaggaaaacctggaataccctagcgtgaccctgccacctcagcctcacaccaaggagggcgttgatgcctacaacgaagtgatcgcccgggtgcgaatgtgggtgaacctgaacctgtggcagaagctgaagctaagcagagatgatgccaagcctctgctgagactgaagggattcccttcctttcctctggtcgagagacaggccaacgaagtggactggtgggacatggtgtgtaacgtgaagaagctgatcaacgagaaaaaggaggatggcaaggtgttttggcagaatctggctggctacaagagacaggaagccctgagaccatacctgagcagcgaggaagatcggaagaagggaaagaaattcgctcggtaccagctgggcgacctgctgctgcacctggaaaagaagcacggcgaggactggggaaaggtgtacgacgaggcctgggagcggattgacaagaaagtggaaggcctgagcaagcacatcaagctggaagaggaacggagaagcgaggacgcccagagcaaggccgccctgaccgactggctgcgggctaaggccagcttcgtgatcgagggcctgaaggaggccgacaaggacgagttctgcagatgcgagctgaagctgcagaagtggtacggggacctgcggggaaagcccttcgccatcgaagccgagaacagcatcctggacatcagcggcttcagcaagcagtacaactgtgccttcatctggcagaaggacggcgtgaagaagctgaacctgtacctgatcatcaactacttcaagggcggcaagctgcggttcaagaagatcaaacctgaagccttcgaagccaacagattctacaccgtgatcaacaaaaagagcggcgagatcgtgcccatggaggtgaacttcaacttcgacgaccccaacctgatcatcctgcctctggcctttggcaagagacagggcagagaattcatctggaacgacctgctgtccctggaaaccggcagcctgaagctggccaacggaagagtgatcgagaagacactgtacaacagaagaacccggcaggatgagcctgccctgttcgtggccctgaccttcgagcggcgggaggtcctggactcctccaatatcaaaccaatgaacctgatcggcgtggcaagaggcgaaaacatccccgccgtgatcgccctgaccgaccccgagggctgcccactgagccggtttaaggatagcctgggaaacccaacccacatcctgagaatcggcgagagctataaggagaagcagcggaccatccaggccaagaaggaggtggagcagcggagagccggcggctacagccggaagtacgccagcaaagccaagaatctggcagacgatatggtgagaaacaccgctagagatctgctgtactacgccgtgacccaggatgccatgctgatcttcgccaacctgagccggggcttcggccggcagggcaagcggaccttcatggccgagagacagtacacacggatggaggactggctgaccgccaagctggcctacgagggcctgagcaagacctacctgtccaagacactggcccagtacacctccaagacatgcagcaactgtgggtttaccatcaccagcgccgactacgacagggtgctggagaagctgaagaagacagcaacaggctggatgaccacaattaacggcaaggagctgaaggtggagggccagattacctactacaacagatacaagagacagaacgtagtcaaggacctgtccgtcgagctggatagactgagcgaagaatctgtgaacaacgacatctcctcctggacaaagggcagaagcggagaagctctgagcctcctgaagaaaagattctcccatagacccgtgcaggagaagttcgtgtgcctgaactgcggcttcgagacacacgcagccgagcaagccgccctgaacatcgccagatcctggctgttcctgcggagccaggagtacaagaaataccagacaaacaagacaaccggcaacaccgataagagagccttcgtcgagacctggcagtccttttaccggaagaagcttaaggaggtgtggaaacctgccgtgcggtctggcggatctggcggaggctccctgctgaccttcgaggacgtcgccgtgtccttcagcgaggaagaatgggagctgctcgatcctcctcagaaaaccctgtacaacgacgtgatgcaagagaactacgagacagtgatctctctgggcctgaagctgaagaacgacaccggaaatgatcagcccatcagcatcagcgccctggaaatgcaggccagcggcagcaaggtgctgcggaaggccagaatgaaagtggctcagaagacaggcggcccaagcagcggcgcccctcctcccagcggcggcagcccagccggctccccaacctctaccgaggagggcacctctgagtccgccacccccgagagcggccctggcacctccaccgagcccagcgagggcagcgcacccggcagccctgccggcagccccacctccacagaggagggaaccagcaccgagcccagcgaaggcagcgccccaggcaccagcaccgagcctagtgagcaggagattaaacggatcaacaagatcagaagaagacttgtgaaagacagcaacaccaagaaggccggcaagacaggccccatgaaaaccctgctggttagagtgatgacacccgatctgagagagcggctggaaaacctgagaaagaagcctgaaaatatcccccagcccatcagcaatacatctagagccaacctgaataagctgctgaccgattacaccgaaatgaagaaggcgatcctgcatgtgtactgggaagagttccagaaggaccctgtgggcctgatgagccgggtggcccagcctgccagcaagaagatcgatcagaacaagctgaaacctgagatggacgagaagggcaacctgaccaccgccggctttgcctgctctcagtgtggccagcccctgttcgtgtacaagctggagcaggtgtctgagaagggcaaggcttacaccaactacttcggacggtgcaatgtggccgagcacgaaaagctgatcctgctggcccagctgaagcccgagaaggatagcgacgaagccgtgacatatagcctgggaaagtttgggcagagggccctggatttctacagcattcatgtgaccaaggagtccacccaccccgtgaagcccctggcccagatcgccggaaacagatacgcctccggacctgtgggaaaggccctgagcgacgcatgtatgggcacaatcgcctccttcctgtctaagtaccaggacatcatcatcgaacaccagaaggtggtgaagggcaaccagaagagactggagagcctgcgggagctggccggcaaggaaaacctggaataccctagcgtgaccctgccacctcagcctcacaccaaggagggcgttgatgcctacaacgaagtgatcgcccgggtgcgaatgtgggtgaacctgaacctgtggcagaagctgaagctaagcagagatgatgccaagcctctgctgagactgaagggattcccttcctttcctctggtcgagagacaggccaacgaagtggactggtgggacatggtgtgtaacgtgaagaagctgatcaacgagaaaaaggaggatggcaaggtgttttggcagaatctggctggctacaagagacaggaagccctgagaccatacctgagcagcgaggaagatcggaagaagggaaagaaattcgctcggtaccagctgggcgacctgctgctgcacctggaaaagaagcacggcgaggactggggaaaggtgtacgacgaggcctgggagcggattgacaagaaagtggaaggcctgagcaagcacatcaagctggaagaggaacggagaagcgaggacgcccagagcaaggccgccctgaccgactggctgcgggctaaggccagcttcgtgatcgagggcctgaaggaggccgacaaggacgagttctgcagatgcgagctgaagctgcagaagtggtacggggacctgcggggaaagcccttcgccatcgaagccgagaacagcatcctggacatcagcggcttcagcaagcagtacaactgtgccttcatctggcagaaggacggcgtgaagaagctgaacctgtacctgatcatcaactacttcaagggcggcaagctgcggttcaagaagatcaaacctgaagccttcgaagccaacagattctacaccgtgatcaacaaaaagagcggcgagatcgtgcccatggaggtgaacttcaacttcgacgaccccaacctgatcatcctgcctctggcctttggcaagagacagggcagagaattcatctggaacgacctgctgtccctggaaaccggcagcctgaagctggccaacggaagagtgatcgagaagacactgtacaacagaagaacccggcaggatgagcctgccctgttcgtggccctgaccttcgagcggcgggaggtcctggactcctccaatatcaaaccaatgaacctgatcggcgtggcaagaggcgaaaacatccccgccgtgatcgccctgaccgaccccgagggctgcccactgagccggtttaaggatagcctgggaaacccaacccacatcctgagaatcggcgagagctataaggagaagcagcggaccatccaggccaagaaggaggtggagcagcggagagccggcggctacagccggaagtacgccagcaaagccaagaatctggcagacgatatggtgagaaacaccgctagagatctgctgtactacgccgtgacccaggatgccatgctgatcttcgccaacctgagccggggcttcggccggcagggcaagcggaccttcatggccgagagacagtacacacggatggaggactggctgaccgccaagctggcctacgagggcctgagcaagacctacctgtccaagacactggcccagtacacctccaagacatgcagcaactgtgggtttaccatcaccagcgccgactacgacagggtgctggagaagctgaagaagacagcaacaggctggatgaccacaattaacggcaaggagctgaaggtggagggccagattacctactacaacagatacaagagacagaacgtagtcaaggacctgtccgtcgagctggatagactgagcgaagaatctgtgaacaacgacatctcctcctggacaaagggcagaagcggagaagctctgagcctcctgaagaaaagattctcccatagacccgtgcaggagaagttcgtgtgcctgaactgcggcttcgagacacacgcagccgagcaagccgccctgaacatcgccagatcctggctgttcctgcggagccaggagtacaagaaataccagacaaacaagacaaccggcaacaccgataagagagccttcgtcgagacctggcagtccttttaccggaagaagcttaaggaggtgtggaaacctgccgtgcggtctggcggatctggcggaggctccttctcaggagagcgtggccttcgaggacgtggccgtctacttcaccaccaaagagtgggccatcatggtgcccgccgagagagccctgtacagagatgtgatgctggaaaactacgaggccgtggcttttgtggccgtgcctcctacaagcaagcccgctctggtgtcccacctggaacagggcaaggaaagctgcttcatccggcctccaggcgtgctgagcagaagcgactggcgggccggaggatctggctccggcagcggccccaagaaaaagagaaaagtctaagctgccttctgcggggcttgccttctggccatgcccttcttctctcccttgcacctgtacctcttggtctttgaataaagcctgagtaggaaggctagcaaaaaaaaaaaaaaaaaaaaaaaaaaaaaaaaaaaaaaaaaaaaaaaaaaaaaaaaaaaaaaaaaaaaaaaaaaaaaaaa

SEQ ID NO: 18562 - RNA, 9485 nt, synthetic construct
  source 1..9485: mol_type = other RNA
aggaaataagagagaaaagaagagtaagaagaaatataagagccaccatggcccctaagaagaagcgtaaagtgagccggatggaacgcctcgtctacgaggtgcggcagaagtgcagaaacatcgaggacatctgcatctcctgcggatctctgaacgtgaccctggagcacccactgttcatcggcggcatgtgccagaactgtaaaaactgttttctggagtgtgcctatcaatacgacgatgacggctaccagagctactgcaccatctgttgcggcggaagagaggtgctgatgtgtggaaataacaactgctgccggtgcttctgcgtggaatgcgtggacctgctggtgggccccggcgccgcccaggccgctattaaggaagatccttggaactgctacatgtgcggccacaagggcacatacggcctgctgagacggagagaggactggcctagcagactgcagatgttcttcgccaataaccacgaccaggagttcgacccccctaaggtgtaccctcccgtccccgccgagaagagaaagcccatccgggtcctgagcctgttcgatggcatcgccaccggtctgctggtgctgaaggacctgggcatccaggtggataggtacattgcctccgaggtgtgcgaggactccatcaccgtgggaatggtgcgtcatcagggcaagatcatgtacgtgggcgacgtgcggagcgtgacacagaagcatatccaggagtggggccctttcgacctggtgatcggcggcagcccttgcaatgacctgagcatcgtgaacccagcccggaagggcctgtacgagggaaccggcagactgttcttcgagttttacagactgctgcacgacgcccggcctaaggaaggcgacgaccggcccttcttttggctgttcgagaatgtggtggccatgggagtcagcgacaagcgggatattagccggttcctggagagcaaccccgtgatgatcgatgccaaggaagtgagcgccgcccaccgggccagatacttctggggcaatctgcctggcatgaacagacccctggccagcaccgtgaacgacaagctggagctgcaggagtgcctggagcacggccggatcgccaagttcagcaaggtgagaaccatcaccacccgaagcaacagcatcaaacaaggcaaggaccagcactttcctgtgttcatgaacgagaaggaggacatcctgtggtgtaccgagatggagagagtgttcgggttcccagtccactacacagatgtcagcaacatgtctagactggccagacagagactgctgggaagaagctggtccgtccctgtgatcagacacctgttcgcccctctgaaggagtacttcgcctgcgtgagcagcggcaacagcaacgccaacagccggggccccagcttctctagcggcctggtgccactgtccctgagagggagccacatgggccccatggagatctacaaaaccgtgagcgcctggaagcggcagcctgtgcgcgtgctgagcctgtttcggaatatcgataaagtcctgaaaagcctgggattcctggagagcggctctggctccggcggtggcaccctgaagtacgtggaggatgtgacaaacgtggtcagacgggatgtggagaagtggggccccttcgatctggtgtacggcagcacccaacccctgggcagctcttgtgaccggtgccctggctggtacatgtttcagttccaccggatcctgcagtacgccctgccgagacaggagtcccagcggccattcttttggattttcatggacaacttgctgctgaccgaggatgaccaggaaactaccactcggttcctgcagaccgaagccgtgaccctgcaggacgtgagaggccgggactaccagaacgccatgcgggtgtggtccaacatccctggactgaaaagcaagcacgcacctctgacccctaaagaagaggagtacctgcaggcccaggtgcggagcagaagcaagctggacgcccctaaggtggatctgctggtgaagaattgcctcctgcccctgagagagtacttcaagtatttcagccagaatagtctgcccctgggaggcagcggcggcggcgccctggtgacatttgaggacgtcgccgtgcggttcacccaggaggaatgggctctgctggatccttctcagaaaatcctgtaccgggacgtgatgagagagacataccggaatctgacctccgtgggcatcaactgggaatgttgggaccttgaagcctgcttcagaagcctgggaagaaacctgagagtgcaggtggtgaagagaaagtgcgagctgaccaacagcggcccctgcgccgagggcggcccaagcagcggcgcccctcctcccagcggcggcagcccagccggctccccaacctctaccgaggagggcacctctgagtccgccacccccgagagcggccctggcacctccaccgagcccagcgagggcagcgcacccggcagccctgccggcagccccacctccacagaggagggaaccagcaccgagcccagcgaaggcagcgccccaggcaccagcaccgagcctagtgagcaggagattaaacggatcaacaagatcagaagaagacttgtgaaagacagcaacaccaagaaggccggcaagacaggccccatgaaaaccctgctggttagagtgatgacacccgatctgagagagcggctggaaaacctgagaaagaagcctgaaaatatcccccagcccatcagcaatacatctagagccaacctgaataagctgctgaccgattacaccgaaatgaagaaggcgatcctgcatgtgtactgggaagagttccagaaggaccctgtgggcctgatgagccgggtggcccagcctgccagcaagaagatcgatcagaacaagctgaaacctgagatggacgagaagggcaacctgaccaccgccggctttgcctgctctcagtgtggccagcccctgttcgtgtacaagctggagcaggtgtctgagaagggcaaggcttacaccaactacttcggacggtgcaatgtggccgagcacgaaaagctgatcctgctggcccagctgaagcccgagaaggatagcgacgaagccgtgacatatagcctgggaaagtttgggcagagggccctggatttctacagcattcatgtgaccaaggagtccacccaccccgtgaagcccctggcccagatcgccggaaacagatacgcctccggacctgtgggaaaggccctgagcgacgcatgtatgggcacaatcgcctccttcctgtctaagtaccaggacatcatcatcgaacaccagaaggtggtgaagggcaaccagaagagactggagagcctgcgggagctggccggcaaggaaaacctggaataccctagcgtgaccctgccacctcagcctcacaccaaggagggcgttgatgcctacaacgaagtgatcgcccgggtgcgaatgtgggtgaacctgaacctgtggcagaagctgaagctaagcagagatgatgccaagcctctgctgagactgaagggattcccttcctttcctctggtcgagagacaggccaacgaagtggactggtgggacatggtgtgtaacgtgaagaagctgatcaacgagaaaaaggaggatggcaaggtgttttggcagaatctggctggctacaagagacaggaagccctgagaccatacctgagcagcgaggaagatcggaagaagggaaagaaattcgctcggtaccagctgggcgacctgctgctgcacctggaaaagaagcacggcgaggactggggaaaggtgtacgacgaggcctgggagcggattgacaagaaagtggaaggcctgagcaagcacatcaagctggaagaggaacggagaagcgaggacgcccagagcaaggccgccctgaccgactggctgcgggctaaggccagcttcgtgatcgagggcctgaaggaggccgacaaggacgagttctgcagatgcgagctgaagctgcagaagtggtacggggacctgcggggaaagcccttcgccatcgaagccgagaacagcatcctggacatcagcggcttcagcaagcagtacaactgtgccttcatctggcagaaggacggcgtgaagaagctgaacctgtacctgatcatcaactacttcaagggcggcaagctgcggttcaagaagatcaaacctgaagccttcgaagccaacagattctacaccgtgatcaacaaaaagagcggcgagatcgtgcccatggaggtgaacttcaacttcgacgaccccaacctgatcatcctgcctctggcctttggcaagagacagggcagagaattcatctggaacgacctgctgtccctggaaaccggcagcctgaagctggccaacggaagagtgatcgagaagacactgtacaacagaagaacccggcaggatgagcctgccctgttcgtggccctgaccttcgagcggcgggaggtcctggactcctccaatatcaaaccaatgaacctgatcggcgtggcaagaggcgaaaacatccccgccgtgatcgccctgaccgaccccgagggctgcccactgagccggtttaaggatagcctgggaaacccaacccacatcctgagaatcggcgagagctataaggagaagcagcggaccatccaggccaagaaggaggtggagcagcggagagccggcggctacagccggaagtacgccagcaaagccaagaatctggcagacgatatggtgagaaacaccgctagagatctgctgtactacgccgtgacccaggatgccatgctgatcttcgccaacctgagccggggcttcggccggcagggcaagcggaccttcatggccgagagacagtacacacggatggaggactggctgaccgccaagctggcctacgagggcctgagcaagacctacctgtccaagacactggcccagtacacctccaagacatgcagcaactgtgggtttaccatcaccagcgccgactacgacagggtgctggagaagctgaagaagacagcaacaggctggatgaccacaattaacggcaaggagctgaaggtggagggccagattacctactacaacagatacaagagacagaacgtagtcaaggacctgtccgtcgagctggatagactgagcgaagaatctgtgaacaacgacatctcctcctggacaaagggcagaagcggagaagctctgagcctcctgaagaaaagattctcccatagacccgtgcaggagaagttcgtgtgcctgaactgcggcttcgagacacacgcagccgagcaagccgccctgaacatcgccagatcctggctgttcctgcggagccaggagtacaagaaataccagacaaacaagacaaccggcaacaccgataagagagccttcgtcgagacctggcagtccttttaccggaagaagcttaaggaggtgtggaaacctgccgtgcggtctggcggatctggcggaggctccctgctgaccttcgaggacgtcgccgtgtccttcagcgaggaagaatgggagctgctcgatcctcctcagaaaaccctgtacaacgacgtgatgcaagagaactacgagacagtgatctctctgggcctgaagctgaagaacgacaccggaaatgatcagcccatcagcatcagcgccctggaaatgcaggccagcggcagcaaggtgctgcggaaggccagaatgaaagtggctcagaagacaggcggcccaagcagcggcgcccctcctcccagcggcggcagcccagccggctccccaacctctaccgaggagggcacctctgagtccgccacccccgagagcggccctggcacctccaccgagcccagcgagggcagcgcacccggcagccctgccggcagccccacctccacagaggagggaaccagcaccgagcccagcgaaggcagcgccccaggcaccagcaccgagcctagtgagcaggagattaaacggatcaacaagatcagaagaagacttgtgaaagacagcaacaccaagaaggccggcaagacaggccccatgaaaaccctgctggttagagtgatgacacccgatctgagagagcggctggaaaacctgagaaagaagcctgaaaatatcccccagcccatcagcaatacatctagagccaacctgaataagctgctgaccgattacaccgaaatgaagaaggcgatcctgcatgtgtactgggaagagttccagaaggaccctgtgggcctgatgagccgggtggcccagcctgccagcaagaagatcgatcagaacaagctgaaacctgagatggacgagaagggcaacctgaccaccgccggctttgcctgctctcagtgtggccagcccctgttcgtgtacaagctggagcaggtgtctgagaagggcaaggcttacaccaactacttcggacggtgcaatgtggccgagcacgaaaagctgatcctgctggcccagctgaagcccgagaaggatagcgacgaagccgtgacatatagcctgggaaagtttgggcagagggccctggatttctacagcattcatgtgaccaaggagtccacccaccccgtgaagcccctggcccagatcgccggaaacagatacgcctccggacctgtgggaaaggccctgagcgacgcatgtatgggcacaatcgcctccttcctgtctaagtaccaggacatcatcatcgaacaccagaaggtggtgaagggcaaccagaagagactggagagcctgcgggagctggccggcaaggaaaacctggaataccctagcgtgaccctgccacctcagcctcacaccaaggagggcgttgatgcctacaacgaagtgatcgcccgggtgcgaatgtgggtgaacctgaacctgtggcagaagctgaagctaagcagagatgatgccaagcctctgctgagactgaagggattcccttcctttcctctggtcgagagacaggccaacgaagtggactggtgggacatggtgtgtaacgtgaagaagctgatcaacgagaaaaaggaggatggcaaggtgttttggcagaatctggctggctacaagagacaggaagccctgagaccatacctgagcagcgaggaagatcggaagaagggaaagaaattcgctcggtaccagctgggcgacctgctgctgcacctggaaaagaagcacggcgaggactggggaaaggtgtacgacgaggcctgggagcggattgacaagaaagtggaaggcctgagcaagcacatcaagctggaagaggaacggagaagcgaggacgcccagagcaaggccgccctgaccgactggctgcgggctaaggccagcttcgtgatcgagggcctgaaggaggccgacaaggacgagttctgcagatgcgagctgaagctgcagaagtggtacggggacctgcggggaaagcccttcgccatcgaagccgagaacagcatcctggacatcagcggcttcagcaagcagtacaactgtgccttcatctggcagaaggacggcgtgaagaagctgaacctgtacctgatcatcaactacttcaagggcggcaagctgcggttcaagaagatcaaacctgaagccttcgaagccaacagattctacaccgtgatcaacaaaaagagcggcgagatcgtgcccatggaggtgaacttcaacttcgacgaccccaacctgatcatcctgcctctggcctttggcaagagacagggcagagaattcatctggaacgacctgctgtccctggaaaccggcagcctgaagctggccaacggaagagtgatcgagaagacactgtacaacagaagaacccggcaggatgagcctgccctgttcgtggccctgaccttcgagcggcgggaggtcctggactcctccaatatcaaaccaatgaacctgatcggcgtggcaagaggcgaaaacatccccgccgtgatcgccctgaccgaccccgagggctgcccactgagccggtttaaggatagcctgggaaacccaacccacatcctgagaatcggcgagagctataaggagaagcagcggaccatccaggccaagaaggaggtggagcagcggagagccggcggctacagccggaagtacgccagcaaagccaagaatctggcagacgatatggtgagaaacaccgctagagatctgctgtactacgccgtgacccaggatgccatgctgatcttcgccaacctgagccggggcttcggccggcagggcaagcggaccttcatggccgagagacagtacacacggatggaggactggctgaccgccaagctggcctacgagggcctgagcaagacctacctgtccaagacactggcccagtacacctccaagacatgcagcaactgtgggtttaccatcaccagcgccgactacgacagggtgctggagaagctgaagaagacagcaacaggctggatgaccacaattaacggcaaggagctgaaggtggagggccagattacctactacaacagatacaagagacagaacgtagtcaaggacctgtccgtcgagctggatagactgagcgaagaatctgtgaacaacgacatctcctcctggacaaagggcagaagcggagaagctctgagcctcctgaagaaaagattctcccatagacccgtgcaggagaagttcgtgtgcctgaactgcggcttcgagacacacgcagccgagcaagccgccctgaacatcgccagatcctggctgttcctgcggagccaggagtacaagaaataccagacaaacaagacaaccggcaacaccgataagagagccttcgtcgagacctggcagtccttttaccggaagaagcttaaggaggtgtggaaacctgccgtgcggtctggcggatctggcggaggctccttctaaagcccctatcacattcggcgacctggccatctacttcagccaggaggaatgggagtggctgagccccatccagaaggacctgtacgaggacgtgatgctggaaaactacagaaatctggtgtccctgggcctcagctttagacgccccaacgtgatcaccctgctggaaaagggcaaggccccatggatggtcgagcctgctagacggcggagaggacctgatagcggcagcaaggtgggatctggctccggcagcggccccaagaaaaagagaaaagtctaagctgccttctgcggggcttgccttctggccatgcccttcttctctcccttgcacctgtacctcttggtctttgaataaagcctgagtaggaaggctagcaaaaaaaaaaaaaaaaaaaaaaaaaaaaaaaaaaaaaaaaaaaaaaaaaaaaaaaaaaaaaaaaaaaaaaaaaaaaaaaa

SEQ ID NO: 18563 - RNA, 9485 nt, synthetic construct
  source 1..9485: mol_type = other RNA
aggaaataagagagaaaagaagagtaagaagaaatataagagccaccatggcccctaagaagaagcgtaaagtgagccggatggaacgcctcgtctacgaggtgcggcagaagtgcagaaacatcgaggacatctgcatctcctgcggatctctgaacgtgaccctggagcacccactgttcatcggcggcatgtgccagaactgtaaaaactgttttctggagtgtgcctatcaatacgacgatgacggctaccagagctactgcaccatctgttgcggcggaagagaggtgctgatgtgtggaaataacaactgctgccggtgcttctgcgtggaatgcgtggacctgctggtgggccccggcgccgcccaggccgctattaaggaagatccttggaactgctacatgtgcggccacaagggcacatacggcctgctgagacggagagaggactggcctagcagactgcagatgttcttcgccaataaccacgaccaggagttcgacccccctaaggtgtaccctcccgtccccgccgagaagagaaagcccatccgggtcctgagcctgttcgatggcatcgccaccggtctgctggtgctgaaggacctgggcatccaggtggataggtacattgcctccgaggtgtgcgaggactccatcaccgtgggaatggtgcgtcatcagggcaagatcatgtacgtgggcgacgtgcggagcgtgacacagaagcatatccaggagtggggccctttcgacctggtgatcggcggcagcccttgcaatgacctgagcatcgtgaacccagcccggaagggcctgtacgagggaaccggcagactgttcttcgagttttacagactgctgcacgacgcccggcctaaggaaggcgacgaccggcccttcttttggctgttcgagaatgtggtggccatgggagtcagcgacaagcgggatattagccggttcctggagagcaaccccgtgatgatcgatgccaaggaagtgagcgccgcccaccgggccagatacttctggggcaatctgcctggcatgaacagacccctggccagcaccgtgaacgacaagctggagctgcaggagtgcctggagcacggccggatcgccaagttcagcaaggtgagaaccatcaccacccgaagcaacagcatcaaacaaggcaaggaccagcactttcctgtgttcatgaacgagaaggaggacatcctgtggtgtaccgagatggagagagtgttcgggttcccagtccactacacagatgtcagcaacatgtctagactggccagacagagactgctgggaagaagctggtccgtccctgtgatcagacacctgttcgcccctctgaaggagtacttcgcctgcgtgagcagcggcaacagcaacgccaacagccggggccccagcttctctagcggcctggtgccactgtccctgagagggagccacatgggccccatggagatctacaaaaccgtgagcgcctggaagcggcagcctgtgcgcgtgctgagcctgtttcggaatatcgataaagtcctgaaaagcctgggattcctggagagcggctctggctccggcggtggcaccctgaagtacgtggaggatgtgacaaacgtggtcagacgggatgtggagaagtggggccccttcgatctggtgtacggcagcacccaacccctgggcagctcttgtgaccggtgccctggctggtacatgtttcagttccaccggatcctgcagtacgccctgccgagacaggagtcccagcggccattcttttggattttcatggacaacttgctgctgaccgaggatgaccaggaaactaccactcggttcctgcagaccgaagccgtgaccctgcaggacgtgagaggccgggactaccagaacgccatgcgggtgtggtccaacatccctggactgaaaagcaagcacgcacctctgacccctaaagaagaggagtacctgcaggcccaggtgcggagcagaagcaagctggacgcccctaaggtggatctgctggtgaagaattgcctcctgcccctgagagagtacttcaagtatttcagccagaatagtctgcccctgggaggcagcggcggcggcgccctggtgacatttgaggacgtcgccgtgcggttcacccaggaggaatgggctctgctggatccttctcagaaaatcctgtaccgggacgtgatgagagagacataccggaatctgacctccgtgggcatcaactgggaatgttgggaccttgaagcctgcttcagaagcctgggaagaaacctgagagtgcaggtggtgaagagaaagtgcgagctgaccaacagcggcccctgcgccgagggcggcccaagcagcggcgcccctcctcccagcggcggcagcccagccggctccccaacctctaccgaggagggcacctctgagtccgccacccccgagagcggccctggcacctccaccgagcccagcgagggcagcgcacccggcagccctgccggcagccccacctccacagaggagggaaccagcaccgagcccagcgaaggcagcgccccaggcaccagcaccgagcctagtgagcaggagattaaacggatcaacaagatcagaagaagacttgtgaaagacagcaacaccaagaaggccggcaagacaggccccatgaaaaccctgctggttagagtgatgacacccgatctgagagagcggctggaaaacctgagaaagaagcctgaaaatatcccccagcccatcagcaatacatctagagccaacctgaataagctgctgaccgattacaccgaaatgaagaaggcgatcctgcatgtgtactgggaagagttccagaaggaccctgtgggcctgatgagccgggtggcccagcctgccagcaagaagatcgatcagaacaagctgaaacctgagatggacgagaagggcaacctgaccaccgccggctttgcctgctctcagtgtggccagcccctgttcgtgtacaagctggagcaggtgtctgagaagggcaaggcttacaccaactacttcggacggtgcaatgtggccgagcacgaaaagctgatcctgctggcccagctgaagcccgagaaggatagcgacgaagccgtgacatatagcctgggaaagtttgggcagagggccctggatttctacagcattcatgtgaccaaggagtccacccaccccgtgaagcccctggcccagatcgccggaaacagatacgcctccggacctgtgggaaaggccctgagcgacgcatgtatgggcacaatcgcctccttcctgtctaagtaccaggacatcatcatcgaacaccagaaggtggtgaagggcaaccagaagagactggagagcctgcgggagctggccggcaaggaaaacctggaataccctagcgtgaccctgccacctcagcctcacaccaaggagggcgttgatgcctacaacgaagtgatcgcccgggtgcgaatgtgggtgaacctgaacctgtggcagaagctgaagctaagcagagatgatgccaagcctctgctgagactgaagggattcccttcctttcctctggtcgagagacaggccaacgaagtggactggtgggacatggtgtgtaacgtgaagaagctgatcaacgagaaaaaggaggatggcaaggtgttttggcagaatctggctggctacaagagacaggaagccctgagaccatacctgagcagcgaggaagatcggaagaagggaaagaaattcgctcggtaccagctgggcgacctgctgctgcacctggaaaagaagcacggcgaggactggggaaaggtgtacgacgaggcctgggagcggattgacaagaaagtggaaggcctgagcaagcacatcaagctggaagaggaacggagaagcgaggacgcccagagcaaggccgccctgaccgactggctgcgggctaaggccagcttcgtgatcgagggcctgaaggaggccgacaaggacgagttctgcagatgcgagctgaagctgcagaagtggtacggggacctgcggggaaagcccttcgccatcgaagccgagaacagcatcctggacatcagcggcttcagcaagcagtacaactgtgccttcatctggcagaaggacggcgtgaagaagctgaacctgtacctgatcatcaactacttcaagggcggcaagctgcggttcaagaagatcaaacctgaagccttcgaagccaacagattctacaccgtgatcaacaaaaagagcggcgagatcgtgcccatggaggtgaacttcaacttcgacgaccccaacctgatcatcctgcctctggcctttggcaagagacagggcagagaattcatctggaacgacctgctgtccctggaaaccggcagcctgaagctggccaacggaagagtgatcgagaagacactgtacaacagaagaacccggcaggatgagcctgccctgttcgtggccctgaccttcgagcggcgggaggtcctggactcctccaatatcaaaccaatgaacctgatcggcgtggcaagaggcgaaaacatccccgccgtgatcgccctgaccgaccccgagggctgcccactgagccggtttaaggatagcctgggaaacccaacccacatcctgagaatcggcgagagctataaggagaagcagcggaccatccaggccaagaaggaggtggagcagcggagagccggcggctacagccggaagtacgccagcaaagccaagaatctggcagacgatatggtgagaaacaccgctagagatctgctgtactacgccgtgacccaggatgccatgctgatcttcgccaacctgagccggggcttcggccggcagggcaagcggaccttcatggccgagagacagtacacacggatggaggactggctgaccgccaagctggcctacgagggcctgagcaagacctacctgtccaagacactggcccagtacacctccaagacatgcagcaactgtgggtttaccatcaccagcgccgactacgacagggtgctggagaagctgaagaagacagcaacaggctggatgaccacaattaacggcaaggagctgaaggtggagggccagattacctactacaacagatacaagagacagaacgtagtcaaggacctgtccgtcgagctggatagactgagcgaagaatctgtgaacaacgacatctcctcctggacaaagggcagaagcggagaagctctgagcctcctgaagaaaagattctcccatagacccgtgcaggagaagttcgtgtgcctgaactgcggcttcgagacacacgcagccgagcaagccgccctgaacatcgccagatcctggctgttcctgcggagccaggagtacaagaaataccagacaaacaagacaaccggcaacaccgataagagagccttcgtcgagacctggcagtccttttaccggaagaagcttaaggaggtgtggaaacctgccgtgcggtctggcggatctggcggaggctccctgctgaccttcgaggacgtcgccgtgtccttcagcgaggaagaatgggagctgctcgatcctcctcagaaaaccctgtacaacgacgtgatgcaagagaactacgagacagtgatctctctgggcctgaagctgaagaacgacaccggaaatgatcagcccatcagcatcagcgccctggaaatgcaggccagcggcagcaaggtgctgcggaaggccagaatgaaagtggctcagaagacaggcggcccaagcagcggcgcccctcctcccagcggcggcagcccagccggctccccaacctctaccgaggagggcacctctgagtccgccacccccgagagcggccctggcacctccaccgagcccagcgagggcagcgcacccggcagccctgccggcagccccacctccacagaggagggaaccagcaccgagcccagcgaaggcagcgccccaggcaccagcaccgagcctagtgagcaggagattaaacggatcaacaagatcagaagaagacttgtgaaagacagcaacaccaagaaggccggcaagacaggccccatgaaaaccctgctggttagagtgatgacacccgatctgagagagcggctggaaaacctgagaaagaagcctgaaaatatcccccagcccatcagcaatacatctagagccaacctgaataagctgctgaccgattacaccgaaatgaagaaggcgatcctgcatgtgtactgggaagagttccagaaggaccctgtgggcctgatgagccgggtggcccagcctgccagcaagaagatcgatcagaacaagctgaaacctgagatggacgagaagggcaacctgaccaccgccggctttgcctgctctcagtgtggccagcccctgttcgtgtacaagctggagcaggtgtctgagaagggcaaggcttacaccaactacttcggacggtgcaatgtggccgagcacgaaaagctgatcctgctggcccagctgaagcccgagaaggatagcgacgaagccgtgacatatagcctgggaaagtttgggcagagggccctggatttctacagcattcatgtgaccaaggagtccacccaccccgtgaagcccctggcccagatcgccggaaacagatacgcctccggacctgtgggaaaggccctgagcgacgcatgtatgggcacaatcgcctccttcctgtctaagtaccaggacatcatcatcgaacaccagaaggtggtgaagggcaaccagaagagactggagagcctgcgggagctggccggcaaggaaaacctggaataccctagcgtgaccctgccacctcagcctcacaccaaggagggcgttgatgcctacaacgaagtgatcgcccgggtgcgaatgtgggtgaacctgaacctgtggcagaagctgaagctaagcagagatgatgccaagcctctgctgagactgaagggattcccttcctttcctctggtcgagagacaggccaacgaagtggactggtgggacatggtgtgtaacgtgaagaagctgatcaacgagaaaaaggaggatggcaaggtgttttggcagaatctggctggctacaagagacaggaagccctgagaccatacctgagcagcgaggaagatcggaagaagggaaagaaattcgctcggtaccagctgggcgacctgctgctgcacctggaaaagaagcacggcgaggactggggaaaggtgtacgacgaggcctgggagcggattgacaagaaagtggaaggcctgagcaagcacatcaagctggaagaggaacggagaagcgaggacgcccagagcaaggccgccctgaccgactggctgcgggctaaggccagcttcgtgatcgagggcctgaaggaggccgacaaggacgagttctgcagatgcgagctgaagctgcagaagtggtacggggacctgcggggaaagcccttcgccatcgaagccgagaacagcatcctggacatcagcggcttcagcaagcagtacaactgtgccttcatctggcagaaggacggcgtgaagaagctgaacctgtacctgatcatcaactacttcaagggcggcaagctgcggttcaagaagatcaaacctgaagccttcgaagccaacagattctacaccgtgatcaacaaaaagagcggcgagatcgtgcccatggaggtgaacttcaacttcgacgaccccaacctgatcatcctgcctctggcctttggcaagagacagggcagagaattcatctggaacgacctgctgtccctggaaaccggcagcctgaagctggccaacggaagagtgatcgagaagacactgtacaacagaagaacccggcaggatgagcctgccctgttcgtggccctgaccttcgagcggcgggaggtcctggactcctccaatatcaaaccaatgaacctgatcggcgtggcaagaggcgaaaacatccccgccgtgatcgccctgaccgaccccgagggctgcccactgagccggtttaaggatagcctgggaaacccaacccacatcctgagaatcggcgagagctataaggagaagcagcggaccatccaggccaagaaggaggtggagcagcggagagccggcggctacagccggaagtacgccagcaaagccaagaatctggcagacgatatggtgagaaacaccgctagagatctgctgtactacgccgtgacccaggatgccatgctgatcttcgccaacctgagccggggcttcggccggcagggcaagcggaccttcatggccgagagacagtacacacggatggaggactggctgaccgccaagctggcctacgagggcctgagcaagacctacctgtccaagacactggcccagtacacctccaagacatgcagcaactgtgggtttaccatcaccagcgccgactacgacagggtgctggagaagctgaagaagacagcaacaggctggatgaccacaattaacggcaaggagctgaaggtggagggccagattacctactacaacagatacaagagacagaacgtagtcaaggacctgtccgtcgagctggatagactgagcgaagaatctgtgaacaacgacatctcctcctggacaaagggcagaagcggagaagctctgagcctcctgaagaaaagattctcccatagacccgtgcaggagaagttcgtgtgcctgaactgcggcttcgagacacacgcagccgagcaagccgccctgaacatcgccagatcctggctgttcctgcggagccaggagtacaagaaataccagacaaacaagacaaccggcaacaccgataagagagccttcgtcgagacctggcagtccttttaccggaagaagcttaaggaggtgtggaaacctgccgtgcggtctggcggatctggcggaggctcctgagatgggcctgctgacattcagagacatcgctatcgagttcagcctggaggaatggcaatgtctggactgcgcccagagaaatctgtacagagatgtgatgctggaaaactaccggaacctggtgtctctgggcatcgccgtgtccaagcccgacctgatcacctgcctcgagcagaacaaggaaagccagaacatcaagcggaacaaaatggtcgccaagcaccctgtgatgcacagccacggatctggctccggcagcggccccaagaaaaagagaaaagtctaagctgccttctgcggggcttgccttctggccatgcccttcttctctcccttgcacctgtacctcttggtctttgaataaagcctgagtaggaaggctagcaaaaaaaaaaaaaaaaaaaaaaaaaaaaaaaaaaaaaaaaaaaaaaaaaaaaaaaaaaaaaaaaaaaaaaaaaaaaaaaa

SEQ ID NO: 18564 - RNA, 9485 nt, synthetic construct; identical to SEQ ID NO: 18491
  modified_base 1..9485: mod_base = OTHER; note = Each t is m1f
  source 1..9485: mol_type = other RNA

SEQ ID NO: 18565 - RNA, 9485 nt, synthetic construct; identical to SEQ ID NO: 18492
  modified_base 1..9485: mod_base = OTHER; note = Each t is m1f
  source 1..9485: mol_type = other RNA

SEQ ID NO: 18566 - RNA, 9512 nt, synthetic construct; identical to SEQ ID NO: 18493
  modified_base 1..9512: mod_base = OTHER; note = Each t is m1f
  source 1..9512: mol_type = other RNA

SEQ ID NO: 18567 - RNA, 9494 nt, synthetic construct; identical to SEQ ID NO: 18494
  modified_base 1..9494: mod_base = OTHER; note = Each t is m1f
  source 1..9494: mol_type = other RNA

SEQ ID NO: 18568 - RNA, 9485 nt, synthetic construct; identical to SEQ ID NO: 18495
  modified_base 1..9485: mod_base = OTHER; note = Each t is m1f
  source 1..9485: mol_type = other RNA

SEQ ID NO: 18569 - RNA, 9485 nt, synthetic construct; identical to SEQ ID NO: 18496
  modified_base 1..9485: mod_base = OTHER; note = Each t is m1f
  source 1..9485: mol_type = other RNA

SEQ ID NO: 18570 - RNA, 9485 nt, synthetic construct; identical to SEQ ID NO: 18497
  modified_base 1..9485: mod_base = OTHER; note = Each t is m1f
  source 1..9485: mol_type = other RNA

SEQ ID NO: 18571 - RNA, 9485 nt, synthetic construct; identical to SEQ ID NO: 18498
  modified_base 1..9485: mod_base = OTHER; note = Each t is m1f
  source 1..9485: mol_type = other RNA

SEQ ID NO: 18572 - RNA, 9485 nt, synthetic construct; identical to SEQ ID NO: 18499
  modified_base 1..9485: mod_base = OTHER; note = Each t is m1f
  source 1..9485: mol_type = other RNA

SEQ ID NO: 18573 - RNA, 9485 nt, synthetic construct; identical to SEQ ID NO: 18500
  modified_base 1..9485: mod_base = OTHER; note = Each t is m1f
  source 1..9485: mol_type = other RNA

SEQ ID NO: 18574 - RNA, 9512 nt, synthetic construct; identical to SEQ ID NO: 18501
  modified_base 1..9512: mod_base = OTHER; note = Each t is m1f
  source 1..9512: mol_type = other RNA

SEQ ID NO: 18575 - RNA, 9494 nt, synthetic construct; identical to SEQ ID NO: 18502
  modified_base 1..9494: mod_base = OTHER; note = Each t is m1f
  source 1..9494: mol_type = other RNA

SEQ ID NO: 18576 - RNA, 9485 nt, synthetic construct; identical to SEQ ID NO: 18503
  modified_base 1..9485: mod_base = OTHER; note = Each t is m1f
  source 1..9485: mol_type = other RNA

SEQ ID NO: 18577 - RNA, 9485 nt, synthetic construct; identical to SEQ ID NO: 18504
  modified_base 1..9485: mod_base = OTHER; note = Each t is m1f
  source 1..9485: mol_type = other RNA

SEQ ID NO: 18578 - RNA, 9485 nt, synthetic construct; identical to SEQ ID NO: 18505
  modified_base 1..9485: mod_base = OTHER; note = Each t is m1f
  source 1..9485: mol_type = other RNA

SEQ ID NO: 18579 - RNA, 9485 nt, synthetic construct; identical to SEQ ID NO: 18506
  modified_base 1..9485: mod_base = OTHER; note = Each t is m1f
  source 1..9485: mol_type = other RNA

SEQ ID NO: 18580 - RNA, 9485 nt, synthetic construct; identical to SEQ ID NO: 18507
  modified_base 1..9485: mod_base = OTHER; note = Each t is m1f
  source 1..9485: mol_type = other RNA

SEQ ID NO: 18581 - RNA, 9485 nt, synthetic construct; identical to SEQ ID NO: 18508
  modified_base 1..9485: mod_base = OTHER; note = Each t is m1f
  source 1..9485: mol_type = other RNA

SEQ ID NO: 18582 - RNA, 9512 nt, synthetic construct; identical to SEQ ID NO: 18509
  modified_base 1..9512: mod_base = OTHER; note = Each t is m1f
  source 1..9512: mol_type = other RNA

SEQ ID NO: 18583 - RNA, 9494 nt, synthetic construct; identical to SEQ ID NO: 18510
  modified_base 1..9494: mod_base = OTHER; note = Each t is m1f
  source 1..9494: mol_type = other RNA

SEQ ID NO: 18584 - RNA, 9485 nt, synthetic construct; identical to SEQ ID NO: 18511
  modified_base 1..9485: mod_base = OTHER; note = Each t is m1f
  source 1..9485: mol_type = other RNA

SEQ ID NO: 18585 - RNA, 9485 nt, synthetic construct; identical to SEQ ID NO: 18512
  modified_base 1..9485: mod_base = OTHER; note = Each t is m1f
  source 1..9485: mol_type = other RNA

SEQ ID NO: 18586 - RNA, 9485 nt, synthetic construct; identical to SEQ ID NO: 18513
  modified_base 1..9485: mod_base = OTHER; note = Each t is m1f
  source 1..9485: mol_type = other RNA

SEQ ID NO: 18587 - RNA, 9485 nt, synthetic construct; identical to SEQ ID NO: 18514
  modified_base 1..9485: mod_base = OTHER; note = Each t is m1f
  source 1..9485: mol_type = other RNA

SEQ ID NO: 18588 - RNA, 9512 nt, synthetic construct; identical to SEQ ID NO: 18515
  modified_base 1..9512: mod_base = OTHER; note = Each t is m1f
  source 1..9512: mol_type = other RNA

SEQ ID NO: 18589 - RNA, 9512 nt, synthetic construct; identical to SEQ ID NO: 18516
  modified_base 1..9512: mod_base = OTHER; note = Each t is m1f
  source 1..9512: mol_type = other RNA

SEQ ID NO: 18590 - RNA, 9512 nt, synthetic construct; identical to SEQ ID NO: 18517
  modified_base 1..9512: mod_base = OTHER; note = Each t is m1f
  source 1..9512: mol_type = other RNA

SEQ ID NO: 18591 - RNA, 9521 nt, synthetic construct; identical to SEQ ID NO: 18518
  modified_base 1..9521: mod_base = OTHER; note = Each t is m1f
  source 1..9521: mol_type = other RNA

SEQ ID NO: 18592 - RNA, 9512 nt, synthetic construct; identical to SEQ ID NO: 18519
  modified_base 1..9512: mod_base = OTHER; note = Each t is m1f
  source 1..9512: mol_type = other RNA

SEQ ID NO: 18593 - RNA, 9512 nt, synthetic construct; identical to SEQ ID NO: 18520
  modified_base 1..9512: mod_base = OTHER; note = Each t is m1f
  source 1..9512: mol_type = other RNA

SEQ ID NO: 18594 - RNA, 9512 nt, synthetic construct; identical to SEQ ID NO: 18521
  modified_base 1..9512: mod_base = OTHER; note = Each t is m1f
  source 1..9512: mol_type = other RNA

SEQ ID NO: 18595 - RNA, 9512 nt, synthetic construct; identical to SEQ ID NO: 18522
  modified_base 1..9512: mod_base = OTHER; note = Each t is m1f
  source 1..9512: mol_type = other RNA

SEQ ID NO: 18596 - RNA, 9494 nt, synthetic construct; identical to SEQ ID NO: 18523
  modified_base 1..9494: mod_base = OTHER; note = Each t is m1f
  source 1..9494: mol_type = other RNA

SEQ ID NO: 18597 - RNA, 9494 nt, synthetic construct; identical to SEQ ID NO: 18524
  modified_base 1..9494: mod_base = OTHER; note = Each t is m1f
  source 1..9494: mol_type = other RNA

SEQ ID NO: 18598 - RNA, 9494 nt, synthetic construct; identical to SEQ ID NO: 18525
  modified_base 1..9494: mod_base = OTHER; note = Each t is m1f
  source 1..9494: mol_type = other RNA

SEQ ID NO: 18599 - RNA, 9521 nt, synthetic construct; identical to SEQ ID NO: 18526
  modified_base 1..9521: mod_base = OTHER; note = Each t is m1f
  source 1..9521: mol_type = other RNA

SEQ ID NO: 18600 - RNA, 9494 nt, synthetic construct; identical to SEQ ID NO: 18527
  modified_base 1..9494: mod_base = OTHER; note = Each t is m1f
  source 1..9494: mol_type = other RNA

SEQ ID NO: 18601 - RNA, 9494 nt, synthetic construct; identical to SEQ ID NO: 18528
  modified_base 1..9494: mod_base = OTHER; note = Each t is m1f
  source 1..9494: mol_type = other RNA

SEQ ID NO: 18602 - RNA, 9494 nt, synthetic construct; identical to SEQ ID NO: 18529
  modified_base 1..9485: mod_base = OTHER; note = Each t is m1f
  source 1..9494: mol_type = other RNA

SEQ ID NO: 18603 - RNA, 9494 nt, synthetic construct; identical to SEQ ID NO: 18530
  modified_base 1..9494: mod_base = OTHER; note = Each t is m1f
  source 1..9494: mol_type = other RNA

SEQ ID NO: 18604 - RNA, 9485 nt, synthetic construct; identical to SEQ ID NO: 18531
  modified_base 1..9485: mod_base = OTHER; note = Each t is m1f
  source 1..9485: mol_type = other RNA

SEQ ID NO: 18605 - RNA, 9485 nt, synthetic construct; identical to SEQ ID NO: 18532
  modified_base 1..9485: mod_base = OTHER; note = Each t is m1f
  source 1..9485: mol_type = other RNA

SEQ ID NO: 18606 - RNA, 9485 nt, synthetic construct; identical to SEQ ID NO: 18533
  modified_base 1..9485: mod_base = OTHER; note = Each t is m1f
  source 1..9485: mol_type = other RNA

SEQ ID NO: 18607 - RNA, 9512 nt, synthetic construct; identical to SEQ ID NO: 18534
  modified_base 1..9512: mod_base = OTHER; note = Each t is m1f
  source 1..9512: mol_type = other RNA

SEQ ID NO: 18608 - RNA, 9494 nt, synthetic construct; identical to SEQ ID NO: 18535
  modified_base 1..9494: mod_base = OTHER; note = Each t is m1f
  source 1..9494: mol_type = other RNA

SEQ ID NO: 18609 - RNA, 9485 nt, synthetic construct; identical to SEQ ID NO: 18536
  modified_base 1..9485: mod_base = OTHER; note = Each t is m1f
  source 1..9485: mol_type = other RNA

SEQ ID NO: 18610 - RNA, 9485 nt, synthetic construct; identical to SEQ ID NO: 18537
  modified_base 1..9485: mod_base = OTHER; note = Each t is m1f
  source 1..9485: mol_type = other RNA

SEQ ID NO: 18611 - RNA, 9485 nt, synthetic construct; identical to SEQ ID NO: 18538
  modified_base 1..9485: mod_base = OTHER; note = Each t is m1f
  source 1..9485: mol_type = other RNA

SEQ ID NO: 18612 - RNA, 9485 nt, synthetic construct; identical to SEQ ID NO: 18539
  modified_base 1..9485: mod_base = OTHER; note = Each t is m1f
  source 1..9485: mol_type = other RNA

SEQ ID NO: 18613 - RNA, 9485 nt, synthetic construct; identical to SEQ ID NO: 18540
  modified_base 1..9485: mod_base = OTHER; note = Each t is m1f
  source 1..9485: mol_type = other RNA

SEQ ID NO: 18614 - RNA, 9485 nt, synthetic construct; identical to SEQ ID NO: 18541
  modified_base 1..9485: mod_base = OTHER; note = Each t is m1f
  source 1..9485: mol_type = other RNA

SEQ ID NO: 18615 - RNA, 9512 nt, synthetic construct; identical to SEQ ID NO: 18542
  modified_base 1..9512: mod_base = OTHER; note = Each t is m1f
  source 1..9512: mol_type = other RNA

SEQ ID NO: 18616 - RNA, 9494 nt, synthetic construct; identical to SEQ ID NO: 18543
  modified_base 1..9494: mod_base = OTHER; note = Each t is m1f
  source 1..9494: mol_type = other RNA

SEQ ID NO: 18617 - RNA, 9485 nt, synthetic construct; identical to SEQ ID NO: 18544
  modified_base 1..9485: mod_base = OTHER; note = Each t is m1f
  source 1..9485: mol_type = other RNA

SEQ ID NO: 18618 - RNA, 9485 nt, synthetic construct; identical to SEQ ID NO: 18545
  modified_base 1..9485: mod_base = OTHER; note = Each t is m1f
  source 1..9485: mol_type = other RNA

SEQ ID NO: 18619 - RNA, 9485 nt, synthetic construct; identical to SEQ ID NO: 18546
  modified_base 1..9485: mod_base = OTHER; note = Each t is m1f
  source 1..9485: mol_type = other RNA

SEQ ID NO: 18620 - RNA, 9485 nt, synthetic construct; identical to SEQ ID NO: 18547
  modified_base 1..9485: mod_base = OTHER; note = Each t is m1f
  source 1..9485: mol_type = other RNA

SEQ ID NO: 18621 - RNA, 9485 nt, synthetic construct; identical to SEQ ID NO: 18548
  modified_base 1..9485: mod_base = OTHER; note = Each t is m1f
  source 1..9485: mol_type = other RNA

SEQ ID NO: 18622 - RNA, 9485 nt, synthetic construct; identical to SEQ ID NO: 18549
  modified_base 1..9485: mod_base = OTHER; note = Each t is m1f
  source 1..9485: mol_type = other RNA

SEQ ID NO: 18623 - RNA, 9485 nt, synthetic construct; identical to SEQ ID NO: 18550
  modified_base 1..9485: mod_base = OTHER; note = Each t is m1f
  source 1..9485: mol_type = other RNA

SEQ ID NO: 18624 - RNA, 9512 nt, synthetic construct; identical to SEQ ID NO: 18551
  modified_base 1..9512: mod_base = OTHER; note = Each t is m1f
  source 1..9512: mol_type = other RNA

SEQ ID NO: 18625 - RNA, 9494 nt, synthetic construct; identical to SEQ ID NO: 18552
  modified_base 1..9494: mod_base = OTHER; note = Each t is m1f
  source 1..9494: mol_type = other RNA

SEQ ID NO: 18626 - RNA, 9485 nt, synthetic construct; identical to SEQ ID NO: 18553
  modified_base 1..9485: mod_base = OTHER; note = Each t is m1f
  source 1..9485: mol_type = other RNA

SEQ ID NO: 18627 - RNA, 9485 nt, synthetic construct; identical to SEQ ID NO: 18554
  modified_base 1..9485: mod_base = OTHER; note = Each t is m1f
  source 1..9485: mol_type = other RNA

SEQ ID NO: 18628 - RNA, 9485 nt, synthetic construct; identical to SEQ ID NO: 18555
  modified_base 1..9485: mod_base = OTHER; note = Each t is m1f
  source 1..9485: mol_type = other RNA

SEQ ID NO: 18629 - RNA, 9485 nt, synthetic construct; identical to SEQ ID NO: 18556
  modified_base 1..9485: mod_base = OTHER; note = Each t is m1f
  source 1..9485: mol_type = other RNA

SEQ ID NO: 18630 - RNA, 9485 nt, synthetic construct; identical to SEQ ID NO: 18557
  modified_base 1..9485: mod_base = OTHER; note = Each t is m1f
  source 1..9485: mol_type = other RNA

SEQ ID NO: 18631 - RNA, 9485 nt, synthetic construct; identical to SEQ ID NO: 18558
  modified_base 1..9485: mod_base = OTHER; note = Each t is m1f
  source 1..9485: mol_type = other RNA

SEQ ID NO: 18632 - RNA, 9512 nt, synthetic construct; identical to SEQ ID NO: 18559
  modified_base 1..9512: mod_base = OTHER; note = Each t is m1f
  source 1..9512: mol_type = other RNA

SEQ ID NO: 18633 - RNA, 9494 nt, synthetic construct; identical to SEQ ID NO: 18560
  modified_base 1..9494: mod_base = OTHER; note = Each t is m1f
  source 1..9494: mol_type = other RNA

SEQ ID NO: 18634 - RNA, 9485 nt, synthetic construct; identical to SEQ ID NO: 18561
  modified_base 1..9485: mod_base = OTHER; note = Each t is m1f
  source 1..9485: mol_type = other RNA

SEQ ID NO: 18635 - RNA, 9485 nt, synthetic construct; identical to SEQ ID NO: 18562
  modified_base 1..9485: mod_base = OTHER; note = Each t is m1f
  source 1..9485: mol_type = other RNA

SEQ ID NO: 18636 - RNA, 9485 nt, synthetic construct; identical to SEQ ID NO: 18563
  modified_base 1..9485: mod_base = OTHER; note = Each t is m1f
  source 1..9485: mol_type = other RNA

SEQ ID NO: 18637 - RNA, 243 nt, synthetic construct
  source 1..243: mol_type = other RNA
caggacgtggtgaccttcaaggacgtggccatctacttcagccccgaggagtgggtgaggctgagcgccggccagagggagctgtaccaggaggtgatgctggacaactacgagctggtgaccagcctggacagggagagcaagctgctgtacaagatggaccccgaggaggagagctgcgagggcgtgccctacagcagcgccgacagcggcgcccccgacagcagcagcaccagcgcctgc

SEQ ID NO: 18638 - RNA, 243 nt, synthetic construct
  source 1..243: mol_type = other RNA
gccctggtgaccttcgaggacgtggccgtgaggttcacccaggaggagtgggccctgctggaccccagccagaagatcctgtacagggacgtgatgagggagacctacaggaacctgaccagcgtgggcatcaactgggagtgctgggacctggaggcctgcttcaggagcctgggcaggaacctgagggtgcaggtggtgaagaggaagtgcgagctgaccaacagcggcccctgcgccgag

SEQ ID NO: 18639 - RNA, 243 nt, synthetic construct
  source 1..243: mol_type = other RNA
agcaaggcccccatcaccttcggcgacctggccatctacttcagccaggaggagtgggagtggctgagccccatccagaaggacctgtacgaggacgtgatgctggagaactacaggaacctggtgagcctgggcctgagcttcaggaggcccaacgtgatcaccctgctggagaagggcaaggccccctggatggtggagcccgccaggaggaggaggggccccgacagcggcagcaaggtg

SEQ ID NO: 18640 - RNA, 243 nt, synthetic construct
  source 1..243: mol_type = other RNA
gagatgggcctgctgaccttcagggacatcgccatcgagttcagcctggaggagtggcagtgcctggactgcgcccagaggaacctgtacagggacgtgatgctggagaactacaggaacctggtgagcctgggcatcgccgtgagcaagcccgacctgatcacctgcctggagcagaacaaggagagccagaacatcaagaggaacaagatggtggccaagcaccccgtgatgcacagccac

SEQ ID NO: 18641 - RNA, 243 nt, synthetic construct
  source 1..243: mol_type = other RNA
agccaggagagcgtggccttcgaggacgtggccgtgtacttcaccaccaaggagtgggccatcatggtgcccgccgagagggccctgtacagggacgtgatgctggagaactacgaggccgtggccttcgtggccgtgccccccaccagcaagcccgccctggtgagccacctggagcagggcaaggagagctgcttcatcaggccccccggcgtgctgagcaggagcgactggagggccggc

SEQ ID NO: 18642 - RNA, 243 nt, synthetic construct
  source 1..243: mol_type = other RNA
agcacccccgtgaccttcgaggacgtggtggtgtacttcaccgccgccgagtgggtgcacctgaccaactggcagagggacttctaccaggccgtgatgatggagacctacgagctggtggccagcgtggccggcgacggcgtgcccatggccgaggacgaggagggcggcgtggagaggcccgtgtggcagtacatccccaggggcaagaggaggaggaagaccccccagcccagggccgac

SEQ ID NO: 18643 - RNA, 243 nt, synthetic construct
  source 1..243: mol_type = other RNA
ctgctgaccttcgaggacgtggccgtgagcttcagcgaggaggagtgggagctgctggaccccccccagaagaccctgtacaacgacgtgatgcaggagaactacgagaccgtgatcagcctgggcctgaagctgaagaacgacaccggcaacgaccagcccatcagcatcagcgccctggagatgcaggccagcggcagcaaggtgctgaggaaggccaggatgaaggtggcccagaagacc

SEQ ID NO: 18644 - RNA, 252 nt, synthetic construct
  source 1..252: mol_type = other RNA
gtgacctacaacgacgtgcacgtggacatcacccaggaggagtgggccctgatggaccccagccagaggaacctgtacaaggacgtgatggtggagacctacatgaacctgaccgccatcggctacaactgggagaacctggaggtggaggagccctgccagaaccccctgaagcacggcaggcacgagaggccccacaccggcgagaagccctacgagtacaaccagtgcggcaaggccttcgcccagccc

SEQ ID NO: 18645 - RNA, 270 nt, synthetic construct
  source 1..270: mol_type = other RNA
gtggccttcagggacgtgatcgtggacttcacccaggaggagtggcagcagctgaagcccgcccagaaggacctgtacagggacgtgatgatggagatctactggaacctggtgagcctggacctggagaccgagggcgacatgaacgagcccgaccccgagaaggacagctgggaggacaggaccagcatcgtggtggtggagggcctgatgaggaacggcgcccagggctacgcctgcgagaaggccggcatccagggctgcagggtg

SEQ ID NO: 18646 - RNA, 243 nt, synthetic construct
  source 1..243: mol_type = other RNA
atggccttcgaggacgtggccgtgtacttcagccaggaggagtggggcctgctggacaccgcccagagggccctgtacaggagggtgatgctggacaacttcgccctggtggccagcctgggcctgagcaccagcaggcccagggtggtgatccagctggagaggggcgaggagccctgggtgcccagcggcaccgacaccaccctgagcaggaccacctacaggaggaggaaccccggcagc

SEQ ID NO: 18647 - RNA, 243 nt, synthetic construct
  source 1..243: mol_type = other RNA
agccagggcagcgtgaccttcagggacgtggccatcgacttcagccaggaggagtggaagtggctgcagcccgcccagagggacctgtacaggagggtgatgctggagaactacggccacctggtgagcctgggcctgagcatcagcaagcccgacgtggtgagcctgctggagcagggcaaggagccctggctgggcaagaggaacgtgaagagggacctgttcagcgccagcgagagcagc

SEQ ID NO: 18648 - RNA, 243 nt, synthetic construct
  source 1..243: mol_type = other RNA
gtgcaggagcccgtgaccttcaaggacgtggccgtggacttcacccaggaggagtggggccagctggacctggtgcagaggaccctgtacagggacgtgatgctggagacctacggccacctgctgagcgtgggcaaccagatcgccaagcccgaggtgatcagcctgctggagcagggcgaggagccctggagcgtggagcaggcctgcccccagcacacctgccccgagtggatgaggaac

SEQ ID NO: 18649 - RNA, 243 nt, synthetic construct
  source 1..243: mol_type = other RNA
tggcccgagagcgtgaccttcgaggacgtggccgtgtacttcacccagaaccagtgggccagcctggaccccgcccagagggccctgtacggcgaggtgatgctggagaactacgccaacgtggccagcctggtggccttccccttccccaagcccgccctgatcagccacctggagaggggcgaggccccctggggccccgacccctgggacaccgagatccccaggggcatcagccagggc

SEQ ID NO: 18650 - RNA, 243 nt, synthetic construct
  source 1..243: mol_type = other RNA
agccagagccccctgaccttcggcgacgtggccgtggagttcagcggcgaggagtgggcctggctggacagcgcccagaggagcctgcacaggagcgtgatgctggagaactacaggaacctggccagcctgggcctgtgcctgagcaagcccgagatgatcagcagcctggagcagaggaaggagccctgggccgtgaagaggaagagcaccaggggcatgcaccccgacagccagaccctg

SEQ ID NO: 18651 - RNA, 243 nt, synthetic construct
  source 1..243: mol_type = other RNA
ttccaggaggccgtgaccttcaaggacgtggccgtggtgttcaccgaggaggagctgggcctgctggaccccccccagaggaagctgtacagggaggtgatgctggagaacttcaggaacctggtgagcgtgggccacagcagcagcaagcccgacgtgatcagccagctggagagggaggagaagctgtgcgtgaaggagatccacacccagaggggcaggcacagcggcggcaggaaccag

SEQ ID NO: 18652 - RNA, 243 nt, synthetic construct
  source 1..243: mol_type = other RNA
aaggaggccttcgtggccttcggcgacgtggccgtggacttcacccaggaggagtggaggctgctgagccccgcccagaggaccctgcacagggaggtgatgctggagacctacaaccacctggtgagcctggagatccccttcagcaagcccaagctgatcagccagctggagaggggcgaggagccctggatcgaggagaggcagaggcccctgggcctgtgccccgccagcaggcccacc

SEQ ID NO: 18653 - RNA, 243 nt, synthetic construct
  source 1..243: mol_type = other RNA
caggccgaggtgaccttcgaggacgtggccgtgctgttcagcagggaggagtggggcaggctgggccccgcccagaggggcctgtacagggacgtgatgctggagacctacaggaacctggtgagcctgggcgccggccccgccggccccaagcccggcgtgatcacccagctggagaggggcgacgagccctgggtgctggacgcccagggcgccaagggcaaggagaggctgagggtgagc

SEQ ID NO: 18654 - RNA, 243 nt, synthetic construct
  source 1..243: mol_type = other RNA
atgatgttccaggacagcgtggccttcgaggacgtggccgtgaccttcacccaggaggagtgggccctgctggaccccagccagaagaacctgtacagggacgtgatgcaggagaccttcaggaacctggccagcatcggcaagaagtggaagccccagaacatctacgtggagtacgagaacctgaggaggaacctgaggatcgtgggcgagaggctgttcgagagcaaggagggccaccag

SEQ ID NO: 18655 - RNA, 243 nt, synthetic construct
  source 1..243: mol_type = other RNA
caggaccccagcgccgagggcctgagcgaggaggtgcccgtggtgttcgaggagctgcccgtggtgttcgaggacgtggccgtgtacttcaccagggaggagtggggcatgctggacaagaggcagaaggagctgtacagggacgtgatgaggatgaactacgagctgctggccagcctgggccccgccgccgccaagcccgacctgatcagcaagctggagaggagggccgccccctggatc

SEQ ID NO: 18656 - RNA, 243 nt, synthetic construct
  source 1..243: mol_type = other RNA
atgatccaggcccaggagagcatcaccctggaggacgtggccgtggacttcacctgggaggagtggcagctgctgggcgccgcccagaaggacctgtacagggacgtgatgctggagaactacagcaacctggtggccgtgggctaccaggccagcaagcccgacgccctgttcaagctggagcagggcgagcagccctggaccaccgaggacggcatccacagcggcgcctgcagcgacatg

SEQ ID NO: 18657 - RNA, 243 nt, synthetic construct
  source 1..243: mol_type = other RNA
atggacagcgtggccttcgaggacgtggccgtgaacttcacccaggaggagtgggccctgctggaccccagccagaagaacctgtacagggaggtgatgcaggagaccgtgaggaacctggccagcatcggcaagaagtggaacaaccagtacatcgaggacgagcaccagaaccccaggaagaacctgaggaggctgatcggcgagaggctgagcgagagcaaggagagccaccagcacggc

SEQ ID NO: 18658 - RNA, 243 nt, synthetic construct
  source 1..243: mol_type = other RNA
atgcccggcccccccggcagcctggagatggaccccctgaccttcagggacgtggccatcgagttcagcctggaggagtggcagtgcctggacaccgcccagcagaacctgtacaggaacgtgatgctggagaactacaagaacctggccttcctgggcatcgccgtgagcaagcccgacctgatcaccaggctggagaaggagaaggagccctggaagatgaagaggcacaggatggtggac

SEQ ID NO: 18659 - RNA, 243 nt, synthetic construct
  source 1..243: mol_type = other RNA
gaggccgtgaccttcaaggacgtggccgtgttcttcaccgaggaggagctgggcctgctggacctggcccagaggaagctgtacagagacgtgatgctggagaacttcaggaacctgctgagcgtgggccaccagcccttccaccaggacgtgttccacttcctgagggaggagaagttctggatgatggagaccgccacccagagggagggcaacagcggcgagaacgccagcgtgcacccc

SEQ ID NO: 18660 - RNA, 243 nt, synthetic construct
  source 1..243: mol_type = other RNA
agggccctgacccccgtgagcatgaccgccgaggccaagtgcaccggcttcacccagggcagcgtgaccttcgaggacgtggccatctacttcagccaggaggagtggggcctgctggacgaggcccagaggctgctgtacagggacgtgatgctggagaacttcgccctgctgaccagcctggtgtgctggcacggcatggaggacgaggagacccccgagcagagcgtgagcgtgaacggc

SEQ ID NO: 18661 - RNA, 243 nt, synthetic construct
  source 1..243: mol_type = other RNA
caggaccccagcgccgagaggctgatggaggaggtgcccgtggtgttcgaggagctgcccgtggtgttcgaggacgtggccgtgtacttcaccagggaggagtggggcatgctggacaagaggcagaaggagctgtacagggacgtgatgaggatgaactacgagctgctggccagcctgggccccgccgccgccaagcccgacctgatcagcaagctggagaggagggccgccccctggatc

SEQ ID NO: 18662 - RNA, 243 nt, synthetic construct
  source 1..243: mol_type = other RNA
ctggcccccgaggaccacggcagcagctacgagggcagcgtgagcttcagggacgtggccatcgacttcagcagggaggagtggaggcacctggacctgagccagaggaacctgtacagggacgtgatgctggagacctacagccacctgctgagcgtgggctaccaggtgcccgaggccgaggtggtgatgctggagcagggcaacgagccctggagcctgcagggcgagaggccccaccag

SEQ ID NO: 18663 - RNA, 243 nt, synthetic construct
  source 1..243: mol_type = other RNA
atggccgccgccgccctgaggctgcccgcccagggcaccgtgaccttcgaggacgtggccgtgaagttcagccaggaggagtggagcctgctgagcgaggcccagaggtgcctgtaccacgacgtgatgctggagaacctggccctgatcagcagcctgggctgctggtacggcgccaacgacgagacccccagcaagcagaccctgagcatccagcagcagagccccctgaggagccactgg

SEQ ID NO: 18664 - RNA, 243 nt, synthetic construct
  source 1..243: mol_type = other RNA
agcgtgaccttcgaggacgtggccgtgaacttcagcctggaggagtggaacctgctgaacgaggcccagaggtgcctgtacagggacgtgatgctggagaccctgaccctgatcagcagcctgggcgcccccccccacaccctgttccccgccagggcctgcggccccgaggccccccccagcaggcactgccccaggcccagcctgtgcctgagcctgagccccctgcaccccaccggcgtg

SEQ ID NO: 18665 - RNA, 243 nt, synthetic construct
  source 1..243: mol_type = other RNA
atggagctgagggaggccttcgaggacgtggccgtgtacttcaccaggaaggagtgggagctgctggaggacgaggacaaggagctgtacagggacctgatgctgaggaactaccaggccctggtgagcctgggctaccagggccccacccccggcctgatctgcaggatcaagcagagggaggtggagctgtgggtgtgcgacgacgagcaccacggcgagagcagcgtgagcgagaacctg

SEQ ID NO: 18666 - RNA, 243 nt, synthetic construct
  source 1..243: mol_type = other RNA
cagggcagcgtgagcttcgaggacgtggccgtgtacttcaccgaggaggagtgggccctgctggacagcagccagagggccctgcacagggaggtgatgctggagaacagcaggaacctggccgccgtgggctacggccaggagcacaagaactaccaggagcccagcctggccctgttccagagcgaggagaggatgctgggcatccagagggtgctgcagaagaccaggaggagctgcctg

SEQ ID NO: 18667 - RNA, 243 nt, synthetic construct
  source 1..243: mol_type = other RNA
ctggtgaagttcgaggaggtggccgtggtgttcagcgaggacgagtggaacctgctgagcgaccagcagaggggcctgtacatggaggtgatgaaggagaactacgagcacctgatctacctgggctacgaggtgcccgtgatcctgagcctgctgcaggacggcggcggcatcagcagcgacgccggcagccagagcaagagccagcaggtggccgtggccgagggcagcaacgtgaacagc

SEQ ID NO: 18668 - RNA, 243 nt, synthetic construct
  source 1..243: mol_type = other RNA
acccaggtgcccgtgaccttcgaggacgtggccgtgtacttctgcgagggcgagtgggagaccctggccgagtggcagaaggagctgtacagggagaccatgaaggagaactacgagaccctgaccagcctgggcttcagcagcaagaagcccagcctgatcagcaagatcgagagggaggaggacccctgcgtgagggacaagcaggacagcagggacaggaggaggctgaggagctgctgg

SEQ ID NO: 18669 - RNA, 243 nt, synthetic construct
  source 1..243: mol_type = other RNA
agccagtgcctgctgaccttcggcgacgtgagcgtggacttcagccaggaggagtgggagtgcctggacagcgcccagagggccctgtacatcgacgtgatgctggagaactacagcaacctggtgagcgtggagaactacagcacctgcgacaccgtgcaccagcacgtgaacaccggcaaggagagctgccagaggaacaacctgggcgagatgctgaggaaccccagccacgacgccctg

SEQ ID NO: 18670 - RNA, 243 nt, synthetic construct
  source 1..243: mol_type = other RNA
aacgagatggtgaccttcaaggacgtggccgtggtgttcagcggcgaggagctggagctgctggacagcgcccagtggaagctgtaccaggacgtgatgctggagaacttcaggaacctgctgagcgtgggcggcaggatccagaccgagctggagaccttccccgaggccggcccccacgaggagctgagctggcagcagatctgggagcagatcgccagcgacagcaccttcagccaggac

SEQ ID NO: 18671 - RNA, 243 nt, synthetic construct
  source 1..243: mol_type = other RNA
gccagggtggccgtgatgttcagcgacgtgagcatcgccttcagccaggaggagtgggagtacctggacctggcccagagggacctgtacaaggacgtgatgatggagaactacaggaacgtggccagcctggccggctgcttcatcagcaagcccgacgtgatcagcctgctggagcagggcaaggagccctggaaggtggtgaggaagaggaggaggaaccccgacctggagaccaaggac

SEQ ID NO: 18672 - RNA, 243 nt, synthetic construct
  source 1..243: mol_type = other RNA
ccccagagcctgctgagcttcggcgacgtggccgtggacttcagccaggaggagtgggagtacctggactacgaccagaggaccctgtacatggacgtgatgctggagaactacagcaacctggtgttcgtggagaaccacaggatctacggcaagtacgagaaggacctggaccagggcaccaagcacatcgcccacgaggacgtgatcatccaggagaagagctacaagtgcaacgagctg

SEQ ID NO: 18673 - RNA, 243 nt, synthetic construct
  source 1..243: mol_type = other RNA
atccagaacaccgtgacctacgacgacgtgcacatcgacttcacctgggaggagtggaccctgctggaccccagccagaggaacctgtacaaggacgtgatggtggagacctacaccaacctgaccgccgtgggctacagctgggaggaccacaacatggaggagcactgccagagcagccagaggcagaggaggtacaagaggagcaacaccggcgagaagccctgcgagtacacccagtgc

SEQ ID NO: 18674 - RNA, 243 nt, synthetic construct
  source 1..243: mol_type = other RNA
atgaacgccgtgacctacgaggacgtgcacgtgaacttcacccaggaggagtgggccctgctggaccccagccagaagaagctgtacaaggacgtgatgctggagacctacaggaacctgaacgccatcggcttcaactgggacagcaagatcttcaagaacatcgtgcaggtgctggaggacaccgagggcatgaaggaggtgagggtgcagaggaagaggctgaacatcctgaacgtgatc

SEQ ID NO: 18675 - RNA, 243 nt, synthetic construct
  source 1..243: mol_type = other RNA
gccgtgaccatggaggacgtgaccgtgaccttcaccaacgaggagtgggccctgctgaaccccgcccagaagaggctgtacggcgacgtgatgtgggagaccttcaggaccatcagcgccatcggcaggacctgggacagccagcagatggaggaggagtacaagaactacctgaggaacctgagcaacgaggaggtggccaagtgctgcaggtacaccaccttcaaccagcacgagaacatc

SEQ ID NO: 18676 - RNA, 243 nt, synthetic construct
  source 1..243: mol_type = other RNA
agcaacaagctggtgagcttcgacgacgtggccgtggagttcagctgggaggagtggcaggagctggacatcagccagaggaccctgtacagggacgtgatgctggagacctacagcatgctggtgagcctgggccacaccggccccaagccccagctgatcgtgaagctggagcaggacgaggagagctacatgagggaggccagcgacaagaacttcagcgacgtgcagaagatgaagcac

SEQ ID NO: 18677 - RNA, 243 nt, synthetic construct
  source 1..243: mol_type = other RNA
aagcccggcgccgtgagcttcgccgacgtggccgtgtacttcagccccgaggagtggggctgcctgaggcccgcccagagggccctgtacagggacgtgatgagggagacctacggccacctgggcgccctgggcttccccggccccaagcccgccctgatcagctggatggagcaggagagcgaggcctggagccccgccgcccaggaccccgagaagggcgagaggctgggcggcgccagg

SEQ ID NO: 18678 - RNA, 243 nt, synthetic construct
  source 1..243: mol_type = other RNA
ttccaggagcccctgaagttcagggacgtggccgtggagttcagcctggaggagtggcagtgcctggacaccatccagcagaacctgtacaggaacgtgatgctggagaactacaggaacctggtgttcctgggcatcgccgtgagcaagcccgacctgatcacctgcctggagcaggagaaggagccctggaccaggaagaggcacaggatggtggccaagcccgtgacctgcagccacttc

SEQ ID NO: 18679 - RNA, 243 nt, synthetic construct
  source 1..243: mol_type = other RNA
agccagggcaggctgaggttccaggacgtggccatcgacttcaccctggaggagtgggagtgcctggacctgggccagagggagctgtacagggacgtgatgctggagaactacggcaacctggccagcctgggcctgatcgtgtgcaagcccgacctggtgaccttcctggagaagatgagggacccccaggacgtgaggggcatcgagaccaccgccatccaccccgacctggccagcttc

SEQ ID NO: 18680 - RNA, 243 nt, synthetic construct
  source 1..243: mol_type = other RNA
agccagagccccctgaccttcggcgacgtggccgtggagttcagcggcgaggagtgggcctggctggacagcgcccagaggagcctgcacaggagcgtgatgctggagaactacaggaacctggccagcctgggcctgtgcctgagcaagcccgagatgatcagcagcctggagcagaggaaggagccctgggccgtgaagaggaagagcaccaggggcatgaggcccgacagccagaccctg

SEQ ID NO: 18681 - RNA, 243 nt, synthetic construct
  source 1..243: mol_type = other RNA
agggccgaggaggccgtgaccttcaaggacgtggccgtggtgttcaccgaggaggagctgcagctgctggacctggcccagaggaagctgtacagggacgtgatgctggagaacttcaggaacctgctgagcgtgggccaccagcccttccacggcgacaccttccacttcctgagggaggagaagttctgggtgatggagaccaccagccagagggagggcaacagcggcggcaagatccag

SEQ ID NO: 18682 - RNA, 243 nt, synthetic construct
  source 1..243: mol_type = other RNA
ttccaggcccccgtgaccttcggcgacctggccatctacttcagccaggaggagtgggagtgcctgagccccatccagaaggacctgtacgaggacgtgatgctggagaactaccagaacctggtgagcctgggcctgagcttcaggaggcccaacgtgatcaccctgctggagaagggcaaggccccctggatggtggagcccgtgaagaggaggaggggcctggacctgggcagcaagtgc

SEQ ID NO: 18683 - RNA, 243 nt, synthetic construct
  source 1..243: mol_type = other RNA
agccagggccccgtgagcttcgaggacgtggccgtggacttcacccaggaggagtggcagcagctggaccccgcccagaggaccctgtacagggacgtgatgctggagaactacagccacctggtgagcgtgggctaccccgtgagcaagcccggcgtgatcagcaagctggagcagggcgaggagccctggatcatgaagagggacatcagcaactggatctaccccgacagggagaccagg

SEQ ID NO: 18684 - RNA, 243 nt, synthetic construct
  source 1..243: mol_type = other RNA
agccaggagagcgtggccttcgaggacgtggccgtgtacttcaccaccaaggagtgggccatcatggtgcccgccgagagggccctgtacagggacgtgatgctggagaactacgaggccgtggccttcgtggtgccccccaccagcaagcccgccctggtgagccacctggagcagggcaaggagagctgcttcatcaggccccagggcgtgctgagcaggagcgactggagggccggcctg

SEQ ID NO: 18685 - RNA, 243 nt, synthetic construct
  source 1..243: mol_type = other RNA
ttccagggcagcatcagcttcaaggacgtgaccgtgggcttcacccaggaggagtggcagcacctggaccccagccagagggccctgtacagggacgtgatgctggagaactacagcaacctggtgagcgtgggctactgcgtgcacaagcccgaggtgatcagcaggctggagcagggcgaggagccctggaggctggaggaggagttccccagccagagcttccccgtgtggaccgccgac

SEQ ID NO: 18686 - RNA, 243 nt, synthetic construct
  source 1..243: mol_type = other RNA
ccccaggagagcgtgaccttcaaggacgtggccgtggacttcacctgggaggagtggggctacctggacaccagccagaaggagctgtaccaggaggtgatgctggagaactacaggaacctggtgagcctgggcttcgtggtggccaagcccgacgtgatcagccagctggagcagggcgaggccccctggaggcccgagggcaggttccccaggagcaggcaccccgacagcgacaccagg

SEQ ID NO: 18687 - RNA, 243 nt, synthetic construct
  source 1..243: mol_type = other RNA
tgctaccaggacagcgtgaccttcgacgacgtggccgtggacttcacccaggaggagtggaccctgctggacagcacccagaggagcctgtacagcgacgtgatgctggagaactacaagaacctggccaccgtgggcggccagatcatcaagcccagcctgatcagctggctggagcaggaggagagcaggaccgtgcagggcggcgtgctgaggggcaggaagacccagtggaggggcacc

SEQ ID NO: 18688 - RNA, 243 nt, synthetic construct
  source 1..243: mol_type = other RNA
ccccaggagagcgtgaccttcaaggacatcgccgtggacttcacccaggaggagtgggccctgctggacgccagccagaggaagctgtacagggacgtgatgctggagaacatcggccacctggtgagcgtgggctacagggtgtgcaagagcgacgtgatcagccagctgcagcagggcgtggagctgtggagggagggcaggggcttcccccagggcgtgatccccgacaggaagagcagc

SEQ ID NO: 18689 - RNA, 243 nt, synthetic construct
  source 1..243: mol_type = other RNA
atgggccagctgaccttcaacgacgtgaccatcgagttcagcctggaggagtggcagtgcctggacaagccccagcagaacctgtacagggaggtgatgctggagaactacaggaacctggtgttcctgggcatcgccgtgagcaagcccgacctgatcacctgcctgaagcagggcaaggagccctggaacatcaggaggcacgagatggtgaccaagccccccgccatgtgcagccacttc

SEQ ID NO: 18690 - RNA, 243 nt, synthetic construct
  source 1..243: mol_type = other RNA
gtgtggggccccctgagcttcatggacgtgttcgtggacttcacctgggaggagtggcagctgctggaccccgcccagaagtgcctgtacaggagcgtgatgctggagaactacagcaacctggtgagcctgggctaccagcacaccaagcccgacatcatcttcaagctggagcagggcgaggagctgtgcatggtgcaggcccccatccccaaccagtgctgccccaacaaggtgtggaag

SEQ ID NO: 18691 - RNA, 243 nt, synthetic construct
  source 1..243: mol_type = other RNA
ttccaggccagcgtggtgttcgaggacgtggccgtgaacttcacccccgaggagtgggccctgctgaacaggggccagaggaagctgtacagggacgtgatgctggagacctgcaggaacctgagcgccgtgggcaaggacggcagcatccccagcctggtgttcagcgagaagcagaagttccacagcagcggcgacctgaccaggatgcaggagggcctgctgaggagccccctggtggag

SEQ ID NO: 18692 - RNA, 243 nt, synthetic construct
  source 1..243: mol_type = other RNA
agccaggagcaggtgagcttcaaggacgtgtgcgtggacttcaccagggaggagtggtacctgctggaccccgcccagaagatcctgtacagggacgtgatcctggagaactacagccacctggtgagcgtgggcaactgcatcaccaagcccgaggtgatcttcaagatcgagcagggcgaggagccctggatcctggaggagaggttccccaagcagtgctgcagcgagaggaactggaag

SEQ ID NO: 18693 - RNA, 243 nt, synthetic construct
  source 1..243: mol_type = other RNA
atggtgagcttcgaggacgtggccgtgctgctgagccaggaggagtgggactgcctgatccccgcccagaggggcctgtacagggacgtgatgctggagacctacggcaacctggtgagcctgggcctgcaggccagcaagcccgacgtgatcagcaggctggagcagggcgacgagccctggaccacccacaccctgaggatgcagggcagctggagctggaggcacaagagggagggctgc

SEQ ID NO: 18694 - RNA, 243 nt, synthetic construct
  source 1..243: mol_type = other RNA
agccaggccagcgtgagcttcaaggacgtgaacgtggagttcacccaggacgagtggcagcagatgggccccgcccagaggaacctgtacagggacgtgatgctggagaactacagcaacctggtgagcgtgggctactgcatcttcaagcccaaggtgatcttcaggctggagcagggcgaggagccctggagcagcgaggaggagttcagcagccagaggaggcccaagaactacagggac

SEQ ID NO: 18695 - RNA, 243 nt, synthetic construct
  source 1..243: mol_type = other RNA
ctgcaggagctgctgaccttcaaggacgtgagcgtggagttcagcgtggacgagtgggcctgcctggaccccgcccagcagaccctgtacagggacgtgatgctggagaactacaggcacctggtgttcctgggcctgacccccagcaagccccacctgatcacctgcctggagcagagcaaggagccctggaaggtgaaggcctaccagaccgtggtgaagcaccccgccgtgagcaaccac

SEQ ID NO: 18696 - RNA, 243 nt, synthetic construct
  source 1..243: mol_type = other RNA
gcccaggtgctggtgaccttccaggacgtggccgtggacttcacccaggaggagtggaggctgctggaccccggccagaaggagctgtacaaggaggtgatgctggagaacgtgcagaacgtgctgagcctgggcctgcccgtgcccagggaggactggatcagccacttcgaccagggcagggccccctggatgctggagggcgagggccccagcaacagctgcctgggcagggagaggagg

SEQ ID NO: 18697 - RNA, 243 nt, synthetic construct
  source 1..243: mol_type = other RNA
agggtggtgttcgaggacgtggccgtgtacttcagccaggaggagtggggcctgctggacgaggcccagaggcacctgtaccacgccgtgatgaccgagaacttcgccctggtgaccagcctgggctgctggcacggcgcccagtacgaggaggcccccagcgagcagagcgtgagcgtgggcatgagcgaggtgggcacccccaagcccgaccccagcaccaagaaggcccagccctacgag

SEQ ID NO: 18698 - RNA, 243 nt, synthetic construct
  source 1..243: mol_type = other RNA
atccagggccaggtgaacttcgaggacgtgttcgtgtacttcagccaggaggagtgggtgctgctggacgaggcccagaggctgctgtacagggacgtgatgctggagaacttcgccctgatggccagcctgggccacaccagcttcaccagccacaccgtggccagcctggtgatgggccccgactgggtggacgtgacccccgccgtggccaccggcaccctgagcggcagcggccccggc

SEQ ID NO: 18699 - RNA, 243 nt, synthetic construct
  source 1..243: mol_type = other RNA
gtgttccagggcagcctgagcttcgaggacgtgaccgtggacttcagcagggaggagtggaggctgctggacctggcccagaagagcctgtacagggacgtgatgctggagaactacttcaacctgatcagcgtgggctgccaggtgcccaagcaggaggtgctgttcagcctggagcaggaggagcccaggatgctggacggcgagatcagcagccacaactgcctgggcggcgacatcggc

SEQ ID NO: 18700 - RNA, 243 nt, synthetic construct
  source 1..243: mol_type = other RNA
ttccaggccagcgtgaccttcaaggacgtggccgtggacttcacctgggaggagtggaggctgctggaccccccccagaaggagctgttctgggaggtgatgctggagaactacaggaacctggtgtgcctgggcctggccgacagcaacaaggacgtgatgatgagcaagctggagagcggcgagccccactggatccccaccggcggcgtgctgaggagctgctggcccggctgggagagc

SEQ ID NO: 18701 - RNA, 243 nt, synthetic construct
  source 1..243: mol_type = other RNA
aagcccggcgccgtgagcttcgccgacgtggccgtgtacttcagccccgaggagtggggctgcctgaggcccgcccagagggccctgtacagggacgtgatgagggagacctacggccacctgggcgccctgggcttccccggccccaagcccgccctgatcagctggatggagcaggagagcgaggcctggagcagcgccgcccaggaccccgagaagggcgagaacctgggcggcgccagg

SEQ ID NO: 18702 - RNA, 243 nt, synthetic construct
  source 1..243: mol_type = other RNA
gtgcaggagcccgtgaccttcaaggacgtggccgtggacttcacccaggaggagtggggccagctggacctggtgcagaggaccctgtacagggacgtgatgctggagacctacggccacctgctgagcgtgggcaaccagatcgccaagcccgaggtgatcagcctgctggagcagggcgaggagccctggagcatggagcaggcctgcccccagaggacctgccccgagtggatgaggaac

SEQ ID NO: 18703 - RNA, 243 nt, synthetic construct
  source 1..243: mol_type = other RNA
gtgcagagccacgtggtgttcgaggacgtggccatctacttcagccaggaggagtggggcctgctggacgaggcccagaggttcctgtaccacgccgtgatgctggagaacttcgccctgctgagcagcctgggctgctggcacggcgcccaggacgagcaggccctgagcgagcagggcgtgagcgtgggcggcagccaggtgaggacccccaagcccgcccccagcatccagaagagccag

SEQ ID NO: 18704 - RNA, 243 nt, synthetic construct
  source 1..243: mol_type = other RNA
acccagctgaccgtggaggacgtggacatcaagttcacccccgaggagtgggagtgcctggaccccgcccagagggccctgtactgggacgtgatggaggagacctacaggaacctgctgagcgtggacgtgagccacatccacatgaccaagaagctgcaggccaaggccaacagcggcaagggcgagatcctgcagaccgtgatgttcggcagggccgagacccacgagatcaaggacttc

SEQ ID NO: 18705 - RNA, 243 nt, synthetic construct
  source 1..243: mol_type = other RNA
gccgagggccacgtgaccttcgaggacgtggccgtgtacttcagctgggaggagtggggcctgctggacgaggcccagaggctgctgtacagggacgtgatgctggagaacctggccctgatggccagcctgggcctggccagcagcaggacccacgagatcacccagctggagtggtggagggagcccttcctgcccccctgcggcgtggtgaccgccgccatgcccaggggctggaggagg

SEQ ID NO: 18706 - RNA, 243 nt, synthetic construct
  source 1..243: mol_type = other RNA
ctggtgagcttcgaggacgtggccatggacttcagcagggaggagtggcagcagctggaccccgcccagaggtgcctgtaccaggacgtgatgctggagatctacagccacctgctgagcgtggagggcgccctgggcctgaagaccagccagcagaagatcttcgagaaggccagcttccacaacggcaaggagagcgaggtgaccaggggcggcatgtggtgcagcatcagcgaggacctg

SEQ ID NO: 18707 - RNA, 243 nt, synthetic construct
  source 1..243: mol_type = other RNA
gagcaggagagcgtgagcttcaaggacgtgaccatcgacttcagcagggaggagtggcagcagctggacttcgcccagaagagcctgtacagggacgtgatgctggagaactacttcaacctgatcagcgtgggctgccaggtgcccaagcccgaggtgatcttcaacctggagcaggtggagaacagctgcatgctgcacaggaagatcagcaggcagagctgcctggacggcgacatcggc

SEQ ID NO: 18708 - RNA, 243 nt, synthetic construct
  source 1..243: mol_type = other RNA
cccaaggtgcccgtgaccttcgacgacgtggccgtgtacttcagcgagagcgagtggggcaggctggacaagtggcagaaggagctgtacaagcacgtgatgaggggcaactacgagatgctggtgagcctggactacgccatcagcaagcccgacatcctgaccaggatggagaggggcgaggagccctgccccgacggcccctggggccccgaggagggcaaggagagggaggccgccagg

SEQ ID NO: 18709 - RNA, 243 nt, synthetic construct
  source 1..243: mol_type = other RNA
agccagggcctggtggccttcgaggacgtggccgtgtacttcagcctggaggagtgggagaggctggacgccgaccagagggagctgtaccaggaggtgatgcaggagaactacggcatcctggtgagcctgggctaccccatccccaagcccgacctgatcttcaggctggagcagggcgaggagccctgggtgcccgacagccccaggcccgaggagggcgacatcgtgaccggcgtgtac

SEQ ID NO: 18710 - RNA, 243 nt, synthetic construct
  source 1..243: mol_type = other RNA
atggagggcctggtgatgttcagggacgtggccgtggacttcagccaggaggagtgggcctgcctggaccccgcccagaggggcctgtacagggacgtgatgctggagaactaccaccacctggtgagcctgggcctgagcctgagcaagcccgacgtgatcagcctgctggagcagggcaaggagccctggatggtgagcaggaacatggccggcggctggtgccccgacaggctgaagaac

SEQ ID NO: 18711 - RNA, 243 nt, synthetic construct
  source 1..243: mol_type = other RNA
gtgaggatgcccgtgaccttcgaggacgtggccgtgaccttcacccaggaggagtggggccagctggaccccgcccagaggaccctgtaccaggaggtgatgctggagacctgcggcctgctggtgagcctgggctgccccctgcccaagcccgagctgttctaccccctggaccacagccccgagctgcagaccctgaagaggggcctgagccccaacagctgccccggcgacagcaccaag

SEQ ID NO: 18712 - RNA, 243 nt, synthetic construct
  source 1..243: mol_type = other RNA
ggccccctgaccttcagggacgtggccatcgagttcagccaggaggagtggaagagcctggaccccgtgcagaaggccctgtactgggacgtgatgctggagaactacaggaacctggtgttcctgggcatcctgcccaagtgcatgaccaaggagctgccccccatcggcaacagcaacaccggcgagaagtgccagaccgtgatgctggagaggcacgagtgctacgacgtggagaacttc

SEQ ID NO: 18713 - RNA, 240 nt, synthetic construct
  source 1..240: mol_type = other RNA
atggcccccagccagggcaggctgaccttcgaggacgtggccatcgagttcagccaggaggagtgggagtgcctggaccccgcccagagggccctgtacggcgaggtgatgctggagacctacaggaacctggtgagcctgggcctgaccagcaaggacagctgcagcctgaggaagaagcccaggaggaggaggaggggccagaagaggaccagggagtggcccctgctgaggtaccac

SEQ ID NO: 18714 - RNA, 243 nt, synthetic construct
  source 1..243: mol_type = other RNA
agccagggcctgctgaccttcaaggacgtggccatcgagttcagccccgaggagtgggagtacctggaccccccccagaggatgctgtacaggaccgtgatgctggagaaccacaggaacctggtgttcctgggcctggccgtgagcaagcccgacctgatcatgtgcctggagcagaggagggagccctggaacgtgaagagccacagcaagctggccaagagccccgccgtgaccagccac

SEQ ID NO: 18715 - RNA, 243 nt, synthetic construct
  source 1..243: mol_type = other RNA
atggccttcgaggacgtggccgtgtacttcagccaggaggagtggggcctgctggacaccgcccagagggccctgtacaggagggtgatgctggacaacttcgccctggtggccagcctgggcctgagcaccaccaggcccagggtggtgatccagctggagaggggcgaggagccctgggtgcccagcggcaccgacatgaccatgagcaggaacgcccacaggaggaggaaccccggcagc

SEQ ID NO: 18716 - RNA, 243 nt, synthetic construct
  source 1..243: mol_type = other RNA
ttccagggcagcctgagcttcgaggacgtgaccgtgggcttcagccaggaggagtggcagcacctggaccccgcccagaggaccctgtacagggacgtgatgctggagaactacagccacctggtggccgtgggctgctgcgtgcccaagcccgacgtgatcttcaggctggagcagggccagcagccctggctggtggaggaggagagcctggaccagatctggcccgaggtgtgcagggtg

SEQ ID NO: 18717 - RNA, 243 nt, synthetic construct
  source 1..243: mol_type = other RNA
agcctggccctggtgaccttcaaggacgtgctggtgaacttcaccagggaggagtggaagctgctggacgccgcccagcaggtgatgtacagggacgtgatgctggagaactacaggaacctggtgagcctgggccacaggctgcccaagcccgacgtgatcctgcagctggagaagggcgaggagccctggctggtggagaggggcacccaccaggacgcccaccccgactgggacaccgcc

SEQ ID NO: 18718 - RNA, 240 nt, synthetic construct
  source 1..240: mol_type = other RNA
ctgcagaggctgctgaccttcggcgacgtggccatcgagttcagccaggaggagtggaggtgcctgagccacacccagagggagctgtacagggacgtgatgctggagaactacaggcacctgctgttcctgggcctgatcgtgagcaagcccgacctggtgagcctgctggagcagaggaaggagccctgggacgtgaagaggaagaagaccgtggtgttcgaccccggcaggtgggag

SEQ ID NO: 18719 - RNA, 243 nt, synthetic construct
  source 1..243: mol_type = other RNA
gccctgaggagcgtgatgttcagcgacatcagcatcgacttcagccccgaggagtgggactgcctggacctggagcagaaggacctgtacagggacgtgatgctggagaactacagcaacctggtgagcctgggctgcttcatcagcaagcccgacgtgatcagcctgctggagcagggcaaggagccctggaaggtggtgaggaagaggaggggccagtgccccgacctgcagaccaagtac

SEQ ID NO: 18720 - RNA, 243 nt, synthetic construct
  source 1..243: mol_type = other RNA
agcgtgaccttcagggacgtgatcgtggacttcacccaggaggagtggcagcagctgaagcccgcccagaaggacctgtacagggacgtgatgatggaggtgtactggaacctggtgagcctggacgtggagaccaggcccgacgccaaggagagcgacccccaggaggacgactgggaggacaggcccagcgtggtggtgatcgccgagggccccaccaggaacggcgccaggagctacacc

SEQ ID NO: 18721 - RNA, 243 nt, synthetic construct
  source 1..243: mol_type = other RNA
gacagggtgaagttcaccttcagcgacgtggccgtgtacttcagcgaggaggagtggcagctgctggaggagcagcagaaggagctgtaccagaacgtgatgaaggagaactacaccaccctgatgagcctgggctacaccaccgtgaagcccgacgtgatcagcaagatcgagcagggcaagcagcccctggtgagcagccccagcggcagcaagggcaggagggccatcggcaggcccagc

SEQ ID NO: 18722 - RNA, 243 nt, synthetic construct
  source 1..243: mol_type = other RNA
atgcaggtgaagttcgaggacgtggccgtgagcttcagccaggaggagtgggagtacctggacgagggccagaaggagctgtacagggaggtgatgaaggagaactacgagaccctgctgagcctgggcctgaagtgcctgcagaagatccacgagagcgacaggcccttcacctaccccgcctgcggcaagagcttcaaccaccagagcaacctgaggaagcacaagaggaaccacaccggc

SEQ ID NO: 18723 - RNA, 243 nt, synthetic construct
  source 1..243: mol_type = other RNA
tgcagcaaggagcccctgtgcctgcaggagcccgtgagcttcgccgacgtggccgtgtacttcagcagggaggagtgggccctgctggaccccgcccagagggccctgtactgggacgtgatgctggagacctacgagtgcatcgccagcctgggcggcgaggacccctggatccccgacgtgcacggcctgaaggacatggccggcgacacctgccccggcgacggcatcgccgacctgaag

SEQ ID NO: 18724 - RNA, 243 nt, synthetic construct
  source 1..243: mol_type = other RNA
gtgaccttcgaggaggtggccgtgtacttcagcgaggaggagtgggccctgctggaccccggccagagggccctgtacagggacgtgatgcaggagaactacgagaccgtgatcagcctgggcaaggacttctgccccctgagccccgagcaggtggccctgtgcggcatgctgtgcggcaggagcgagggccacgtgagccagagccccgagcagagggagacctgcaagaggcagcacaag

SEQ ID NO: 18725 - RNA, 243 nt, synthetic construct
  source 1..243: mol_type = other RNA
ctgctgaccttcgaggacgtggccgtgcacttcagcgaggaggagtggcagctgctggaccccaaccagaagaccctgtacaacgaggtgatgtgggacatctgcgaggccgccagcttcgtgggcctgaagttcaagaacgacaccggcaacgccgagcccagcagcgtgagcgccctggagatccaggccgccgagaggcagggcagcaagaccaggaagaacgtggccaggaagaggaag

SEQ ID NO: 18726 - RNA, 243 nt, synthetic construct
  source 1..243: mol_type = other RNA
cagccccagggcaccatgaccttcaaggacgtggaggtgaccttcagccaggacgagtggggcctgctggacgccagccagaggaacctgtacagggacgtgatgctggagaactacggcaacatggccagcgtggtgggccccttcaccaagcccgccctgatcagctggctggaggccagggagccctggggcctgaacgtgcagggcgtgcagttcaagggcaaccccggcgccgccccc

SEQ ID NO: 18727 - RNA, 243 nt, synthetic construct
  source 1..243: mol_type = other RNA
acccagggcagcctgaccttcaaggacgtggccatcgagttcagccaggaggagtggaagtgcctggaccccgtgcagaaggccctgtacagggacgtgatgctggagaactacaggaacctgggcttcctgggcctgtgcctgcccgacctggacatcatcagcatgctggagcagggcaaggagccctggaccgtggtgagccaggtgaagatcaccaggaaccccaactgcggcgagtgc

SEQ ID NO: 18728 - RNA, 243 nt, synthetic construct
  source 1..243: mol_type = other RNA
ggcgaggagcccgtgaacttcgaggaggtggccgtgtacttcagcagggaggagtgggccctgctggaccccgcccagagggccctgtacagggacgtgatgctggagacctacgagtgcgtggccagcctggcccccctgcccgcccccaagcccatggtgatcagcctgctggaggagggcgaggagccctggatccccgacgtgggcagccccgaggccgtggccggcgacgtgagcccc

SEQ ID NO: 18729 - RNA, 243 nt, synthetic construct
  source 1..243: mol_type = other RNA
agccaggagagcgtgaccttccaggacgtgaccgtggacttcacccaggaggagtggtgcatgctggactgcagccagaagaagctgtacagggaggtgatgctggagaacgtgcagaacctgctgagcgtgggcctgcccgtgcccagggagaacctgctgagcagctgccagcagggcgacagcccctggctgctggagcagaagggcaccaggatcttcagggccgacgccgagatctgc

SEQ ID NO: 18730 - RNA, 261 nt, synthetic construct
  source 1..261: mol_type = other RNA
gtgaccttcgaggacgtggccgtgaacttcaccctggaggagtgggccctgctggaccccagccagaagaagctgtacagggacgtgatgagggagaccctgaggaacctggccagcgtgggcgagaagtgggaggaccacgacatcgaggaccagtacaagaaccagggcaggaagctgaggagccacgtgctggagaggctgtgcgagagcaaggagggcagccagtgcggcgagaacttcagcctgatccccaacctg

SEQ ID NO: 18731 - RNA, 279 nt, synthetic construct
  source 1..279: mol_type = other RNA
ttcagggaggtgagcgtgtacttcagcgaggaggagtggagctggctggaccccgaccagaaggccctgtactgggaggtgatgctggagaaccacaggaacatggccagcctgggcgacgacggccaggagaacaaggacagctacgagctgctgcagggcatcaccgccagggacaccatggagaccagcgccatcgagatggaggtggagaggtacaaggagaagcagagcgacgactggaaccaggagagcagcagctgcaccgacgacagcgtg

SEQ ID NO: 18732 - RNA, 243 nt, synthetic construct
  source 1..243: mol_type = other RNA
agccagcacctggtgaccttcgaggacgtggccgtgaacttcacccaggaggagtggaccctgctggaccagacccagagggacctgtacagggacgtgatgctggagaactaccagaacctgatggccctgggcagcgagagctgcaagccccacgtgaacagccccctggagggcgccgaggagctgaggaccagggccaggaggatcctgcagagcgagttcatggccgagagcgacctg

SEQ ID NO: 18733 - RNA, 243 nt, synthetic construct
  source 1..243: mol_type = other RNA
ttcctgctgggcctgctgaccttcagggacgtggccatcgagttcagccaggaggagtggggctgcctgaaccacacccagagggagctgtacagggacgtgatgctggagaactacggccacctgctgttcctgggcctgatcgtgagcaagcccgacctggtgagcttcctggagcagaagaaggagccctgggacgtgaagaggaagaagaccgtggccatccacaggggcaggtgggag

SEQ ID NO: 18734 - RNA, 243 nt, synthetic construct
  source 1..243: mol_type = other RNA
ttcggcaacctgctgggcgtgccctgggcccagggcaacagcgccctgcccgagggcctgctgagcttcaaggacatcagcatggagttcacctgggacgagtggcagctgctggacagcacccagaagtacctgtacagggacgtgatcctggagaactaccacaacctgatcagcgtgggctaccacggcaccaagcccgacctgatcttcaagctggagcagggcgaggacccctggatc

SEQ ID NO: 18735 - RNA, 243 nt, synthetic construct
  source 1..243: mol_type = other RNA
atgagccagggcagcgtgaccttcagggacgtggccatcgacttcagccaggaggagtggaagtggctgcagcccgcccagagggacctgtacaggtgcgtgatgctggagaactacggccacctggtgagcctgggcctgagcatcagcaagcccgacgtggtgagcctgctggagcagggcaaggagccctggctgggcaagagggaggtgaagagggacctgttcagcgtgagcgagagc

SEQ ID NO: 18736 - RNA, 243 nt, synthetic construct
  source 1..243: mol_type = other RNA
cccgcccagggccccggcaaggccaggcccagcaggaagaggggcaggaggcccagggccctgaagttcgtggacgtggccgtgtacttcagccccgaggagtggggctgcctgaggcccgcccagagggccctgtacagggacgtgatgagggagacctacggccacctgggcgccctgggctgcgccggccccaagcccgccctgatcagctggctggagaggaacaccgacgactgggag

SEQ ID NO: 18737 - RNA, 243 nt, synthetic construct
  source 1..243: mol_type = other RNA
atggccgccatgcccctgaaggcccagtaccaggagatggtgaccttcgaggacgtggccgtgcacttcaccaagaccgagtggaccggcctgagccccgcccagagggccctgtacaggagcgtgatgctggagaacttcggcaacctgaccgccctgggctaccccgtgcccaagcccgccctgatcagcctgctggagggcggcgacatggcctggggcctggaggcccaggacgacccc

SEQ ID NO: 18738 - RNA, 243 nt, synthetic construct
  source 1..243: mol_type = other RNA
atggtgaccttcgaggacgtggccgtgcacttcaccaagaccgagtggaccggcctgagccccgcccagagggccctgtacaggagcgtgatgctggagaacttcggcaacctgaccgccctgggctaccccgtgcccaagcccgccctgatcagcctgctggagggcggcgacatggcctggggcctggaggcccaggacgacccccccgccgagaggaccaagaacgtgtgcaaggtgatc

SEQ ID NO: 18739 - RNA, 243 nt, synthetic construct
  source 1..243: mol_type = other RNA
tgcagccacaggagctgcagggaggaccccggcaccagcgagagcagggagatggaccccgtggccttcgacgacgtggccgtgaacttcacccaggaggagtgggccctgctggacatcagccagaggaagctgtacagggaggtgatgctggagaccttcaggaacctgaccagcatcggcaagaagtggaaggaccagaacatcgagtacgagtaccagaaccccaggaggaacttcagg

SEQ ID NO: 18740 - RNA, 243 nt, synthetic construct
  source 1..243: mol_type = other RNA
atggacagcgtggccttcgaggacgtggccgtgaacttcacccaggaggagtggagcctgctggaccccagccagaagaacctgtacagggaggtgatgcaggagaccctgaggaacctggccagcatcggcgagaagtggaaggaccagtacatcgaggaccagtacaagaaccccaggaacaacctgaggagcctgctgggcgagagggtggacgagaacaccgaggagaaccactgcggc

SEQ ID NO: 18741 - RNA, 243 nt, synthetic construct
  source 1..243: mol_type = other RNA
atggacagcgtggccttcgaggacgtggccgtgagcttcacccaggaggagtgggccctgctggaccccagccagaagaacctgtacagggacgtgatgcaggagaccttcaagaacctgaccagcgtgggcaagacctggaaggtgcagaacatcgaggacgagtacaagaaccccaggaggaacctgaggaggagcttcaccctggtggcccaggccggcgtgaggcaggacctgggcagc

SEQ ID NO: 18742 - RNA, 243 nt, synthetic construct
  source 1..243: mol_type = other RNA
atggacagcgtggccttcgaggacgtggccgtgaacttcacccacgaggagtgggccctgctgagccccagccagaagaacctgtacagggacgtgatgagggagaccatcaggaacctgaactgcatcggcatgaagtgggagaaccagaacatcgacgaccagtaccagaacctgaggaggaaccccaggtgcgacgtggtggagaggttcggcaagagcaaggacggcagccagtgcggc

SEQ ID NO: 18743 - RNA, 243 nt, synthetic construct
  source 1..243: mol_type = other RNA
atgggccccctgaccttcaccgacgtggccatcgagttcagcctggaggagtggcagtgcctggacaccgcccagcagaacctgtacaggaacgtgatgctggagaactacaggaacctggtgttcctgggcatcgccgtgagcaagcccgacctgatcacctgcctggagaaggagaaggagccctgcaagatgaagaggcacgagatggtggacgagccccccgacggcgtgagcctgctg

SEQ ID NO: 18744 - RNA, 243 nt, synthetic construct
  source 1..243: mol_type = other RNA
atgggccccctgaccatcagggacgtgaccgtggagttcagcctggaggagtggcactgcctggacaccgcccagcagaacctgtacagggacgtgatgctggagaactacaggaacctggtgttcctgggcatcgccgtgagcaagcccgacctgatcacctgcctggagcagggcaaggagccctgcaacatgaagaggcacgagatggtggccaagccccccgtgatgtgcagccacatc

SEQ ID NO: 18745 - RNA, 243 nt, synthetic construct
  source 1..243: mol_type = other RNA
atgagccaggtgaccttcagcgacgtggccatcgacttcagccacgaggagtgggcctgcctggacagcgcccagagggacctgtacaaggacgtgatggtgcagaactacgagaacctggtgagcgtgggcctgagcgtgaccaagccctacgtgatcatgctgctggaggacggcaaggagccctggatgatggagaagaagctgagcaaggactgggagagcaggtgggagaacaaggag

SEQ ID NO: 18746 - RNA, 243 nt, synthetic construct
  source 1..243: mol_type = other RNA
atggccctgaggagcgtgatgttcagcgacgtgagcatcgacttcagccccgaggagtgggagtacctggacctggagcagaaggacctgtacagggacgtgatgctggagaactacagcaacctggtgagcctggccggctgcttcatcagcaagcccgacgtgatcagcagcctggagcagggcaaggagccctggaaggtggtgaggaagggcaggaggcagtaccccgacctggagacc

SEQ ID NO: 18747 - RNA, 243 nt, synthetic construct
  source 1..243: mol_type = other RNA
atggcccacctgatgatgttcagggacgtggccgtggacttcagccaggaggagtgggagtgcctggacctggagcagaggggcctgtacagggacgtgatgctggagaactacagcaacatggtgagcctgggcctgtgcatctaccagcccgaggccttcagcctgctggagaagggcaaggagccctggaagatcctgagggacgagaccaggggcccctgccccgacatgcagagcagg

SEQ ID NO: 18748 - RNA, 243 nt, synthetic construct
  source 1..243: mol_type = other RNA
atggccgagggcctgaagttcaaggacgtggtgatctacttcagccagaaggagtgggagtgcctgcacagcgcccagaaggacctgtacagggacgtgatgctggagaactacggcaacctggtgctgctgggcctgagcgacaccaagcccaacgtgatcagcctgctggagcagaagaaggagccctggatggtgaagaggaaggagaccaaggagtggtgccccgactgggagttcggc

SEQ ID NO: 18749 - RNA, 243 nt, synthetic construct
  source 1..243: mol_type = other RNA
acctgcatggtgcacaggcagaccatgagctgcagcggcgccggcggcatcaccgccttcgtggccttcagggacgtggccgtggacttcacccaggaggagtggaggctgctgagccccgcccagaggaccctgcacagggaggtgatgctggagacctacaaccacctggtgagcctggagatccccagcagcaagcccaagctgatcgcccagctggagaggggcgaggagccctggagg

SEQ ID NO: 18750 - RNA, 243 nt, synthetic construct
  source 1..243: mol_type = other RNA
atgatcgagtaccagatccccgtgagcttcaaggacgtggtggtgggcttcacccaggaggagtggcaccagctgagccccgcccagagggccctgtacagggacgtgatgctggagacctacagcaacctggtgagcgtgggctacgagggcaccaagcccgacgtgatcctgaggctggagcaggaggaggccccctggatcggcgaggccgcctgccccggctgccactgctgggaggac

SEQ ID NO: 18751 - RNA, 243 nt, synthetic construct
  source 1..243: mol_type = other RNA
atgatcgagtaccagatccccgtgagcttcaaggacgtggtggtgggcttcacccaggaggagtggcaccagctgagccccgcccagagggccctgtacagggacgtgatgctggagacctacagcaacctggtgagcgtgggctacgagggcaccaagcccgacgtgatcctgaggctggagcaggaggaggccccctggatcggcgaggccgcctgccccggctgccactgctggggcatc

SEQ ID NO: 18752 - RNA, 243 nt, synthetic construct
  source 1..243: mol_type = other RNA
atgatcgagtaccagatccccgtgagcttcaaggacgtggtggtgggcttcacccaggaggagtggcaccagctgagccccgcccagagggccctgtacagggacgtgatgctggagacctacagcaacctggtgagcgtgggctacgagggcaccaagcccgacgtgatcctgaggctggagcaggaggaggccccctggatcggcgaggccgcctgccccggctgccactgctggggcaag

SEQ ID NO: 18753 - RNA, 243 nt, synthetic construct
  source 1..243: mol_type = other RNA
atggtgcacggcagcgtgaccttcagggacgtggccatcgacttcagccaggaggagtgggagtgcctgcagcccgaccagaggaccctgtacagggacgtgatgctggagaactacagccacctgatcagcctgggcagcagcatcagcaagcccgacgtgatcaccctgctggagcaggagaaggagccctggatggtggtgaggaaggagaccagcaggaggtaccccgacctggagagc

SEQ ID NO: 18754 - RNA, 243 nt, synthetic construct
  source 1..243: mol_type = other RNA
atgaccaagttccaggaggccgtgaccttcaaggacgtggccgtggccttcaccgaggaggagctgggcctgctggacagcgcccagaggaagctgtacagggacgtgatgctggagaacttcaggaacctggtgagcgtgggccaccagagcttcaagcccgacatgatcagccagctggagagggaggagaagctgtggatgaaggagctgcagacccagaggggcaagcacagcggcttc

SEQ ID NO: 18755 - RNA, 243 nt, synthetic construct
  source 1..243: mol_type = other RNA
atgatcaagttccagatggtgaccttcaaggacgtggccgtggtgttcaccgaggaggagctgggcctgctggacagcgtgcagaggaagctgtacagggacgtgatgctggagaacttcaggaacctgctgctggtggcccaccagcccttcaagcccgacctgatcagccagctggagagggaggagaagctgctgatggtggagaccgagacccccggcgacggctgcagcggcaggaag

SEQ ID NO: 18756 - RNA, 243 nt, synthetic construct
  source 1..243: mol_type = other RNA
atggcccagtgcctggtgaccttcgccgacgtggccatcgacttcagccaggaggagtgggcctgcctgaacagcgcccagagggacctgtactgggacgtgatgctggagaactacagcaacctggtgagcctggacctggagagcgcctacgagaacaagagcctgcccaccgagaagaacatccacgagatcagggccagcaagaggaacagcgacaggaggagcaagagcctgggcagg

SEQ ID NO: 18757 - RNA, 243 nt, synthetic construct
  source 1..243: mol_type = other RNA
atgagcctgggcagcgagctgttcagggacgtggccatcgtgttcagccaggaggagtggcagtggctggcccccgcccagagggacctgtacagggacgtgatgctggagacctacagcaacctggtgagcctgggcctggccgtgagcaagcccgacgtgatcagcttcctggagcagggcaaggagccctggatggtggagagggtggtgagcggcggcctgtgccccggcgccaagggc

SEQ ID NO: 18758 - RNA, 243 nt, synthetic construct
  source 1..243: mol_type = other RNA
atgagcctgggcagcgagctgttcagggacgtggccatcgtgttcagccaggaggagtggcagtggctggcccccgcccagagggacctgtacagggacgtgatgctggagacctacagcaacctggtgagcctgggcctggccgtgagcaagcccgacgtgatcagcttcctggagcagggcaaggagccctggatggtggagagggtggtgagcggcggcctgtgccccgtgctggagagc

SEQ ID NO: 18759 - RNA, 243 nt, synthetic construct
  source 1..243: mol_type = other RNA
atgaacgtggaggtggtgaaggtgatgccccaggacctggtgaccttcaaggacgtggccatcgacttcagccaggaggagtggcagtggatgaaccccgcccagaagaggctgtacaggagcatgatgctggagaactaccagagcctggtgagcctgggcctgtgcatcagcaagccctacgtgatcagcctgctggagcagggcagggagccctgggagatgaccagcgagatgaccagg

SEQ ID NO: 18760 - RNA, 243 nt, synthetic construct
  source 1..243: mol_type = other RNA
gaccccgcccaggtgcccgtggccgccgacctgctgaccgaccacgaggagcagggctacgtgaccttcgaggacgtggccgtgtacttcagccaggaggagtggaggctgctggacgacgcccagaggctgctgtacaggaacgtgatgctggagaacttcaccctgctggccagcctgggcctggccagcagcaagacccacgagatcacccagctggagagctgggaggagcccttcatg

SEQ ID NO: 18761 - RNA, 243 nt, synthetic construct
  source 1..243: mol_type = other RNA
ggcagcctggaggagggcaggagggccaccggcctgcccgccgcccaggtgcaggagcccgtgaccttcaaggacgtggccgtggacttcacccaggaggagtggggccagctggacctggtgcagaggaccctgtacagggacgtgatgctggagacctacggccacctgctgagcgtgggcaaccagatcgccaagcccgaggtgatcagcctgctggagcagggcgaggagccctggagc

SEQ ID NO: 18762 - RNA, 243 nt, synthetic construct
  source 1..243: mol_type = other RNA
atggccggcgaggccgaggcccagctggaccccagcctgcagggcctggtgatgttcgaggacgtgaccgtgtacttcagcagggaggagtggggcctgctgaacgtgacccagaagggcctgtacagggacgtgatgctggagaacttcgccctggtgagcagcctgggcctggcccccagcaggagccccgtgttcacccagctggaggacgacgagcagagctgggtgcccagctgggtg

SEQ ID NO: 18763 - RNA, 243 nt, synthetic construct
  source 1..243: mol_type = other RNA
atgggcccccagggcgccaggaggcaggccttcctggccttcggcgacgtgaccgtggacttcacccagaaggagtggaggctgctgagccccgcccagagggccctgtacagggaggtgaccctggagaactacagccacctggtgagcctgggcatcctgcacagcaagcccgagctgatcaggaggctggagcagggcgaggccccctggggcgaggagaggaggaggaggcccggcccc

SEQ ID NO: 18764 - RNA, 243 nt, synthetic construct
  source 1..243: mol_type = other RNA
atgttccagaccgcctggaggcaggagcccgtgaccttcgaggacgtggccgtgtacttcacccagaacgagtgggccagcctggacagcgtgcagagggccctgtacagggaggtgatgctggagaactacgccaacgtggccagcctggccttccccttcaccacccccgtgctggtgagccagctggagcagggcgagctgccctggggcctggacccctgggagcccatgggcagggag

SEQ ID NO: 18765 - RNA, 243 nt, synthetic construct
  source 1..243: mol_type = other RNA
atgatgaccgccgtgagcctgaccaccaggccccaggagagcgtggccttcgaggacgtggccgtgtacttcaccaccaaggagtgggccatcatggtgcccgccgagagggccctgtacagggacgtgatgctggagaactacgaggccgtggccttcgtggtgccccccaccagcaagcccgccctggtgagccacctggagcagggcaaggagagctgcttcacccagccccagggcgtg

SEQ ID NO: 18766 - RNA, 243 nt, synthetic construct
  source 1..243: mol_type = other RNA
atggagctgctgaccttcaaggacgtggccatcgagttcagccccgaggagtggaagtgcctggacaccagccagcagaacctgtacagggacgtgatgctggagaactacaggaacctggtgagcctgggcgtgaccatcagcaaccccgacctggtgacctgcctggagcagaggaaggagccctacaacctgaagatccacgagaccgccgccaggccccccggccactacaggaagagg

SEQ ID NO: 18767 - RNA, 243 nt, synthetic construct
  source 1..243: mol_type = other RNA
gccgagaccagcagcagcggcctgctggaggagcagaagatgatgaagagccagggcctggtgagcttcaaggacgtggccgtggacttcacccaggaggagtggcagcagctggaccccagccagaggaccctgtacagggacgtgatgctggagaactacagccacctggtgagcatgggctaccccgtgagcaagcccgacgtgatcagcaagctggagcagggcgaggagccctggatc

SEQ ID NO: 18768 - RNA, 243 nt, synthetic construct
  source 1..243: mol_type = other RNA
atggccgccggccagagggaggccaggccccaggtgagcctgaccttcgaggacgtggccgtgctgttcaccagggacgagtggaggaagctggcccccagccagaggaacctgtacagggacgtgatgctggagaactacaggaacctggtgagcctgggcctgcccttcaccaagcccaaggtgatcagcctgctgcagcagggcgaggacccctgggaggtggagaaggacggcagcggc

SEQ ID NO: 18769 - RNA, 243 nt, synthetic construct
  source 1..243: mol_type = other RNA
ggcagccagggcaacctgccccaggccgagatcaccctgatgaaccaggcccaggagagcgtgaccttcgaggacgtggccgtgaacttcaccaacagggagtggcagtgcctgacctacgcccagaggcacctgtacaaggacgtgatgctggagaactacggcaacatggtgagcctgggcttccccttccccaagccccccctgatcagccacctggagagggaggtggacccctgcgtg

SEQ ID NO: 18770 - RNA, 243 nt, synthetic construct
  source 1..243: mol_type = other RNA
gccgagatcaccctgatgaaccaggcccaggacagcaggagcatcctgttccaggagagcgtgaccttcgaggacgtggccgtgaacttcaccaacagggagtggcagtgcctgacctacgcccagaggcacctgtacaaggacgtgatgctggagaactacggcaacatggtgagcctgggcttccccttccccaagccccccctgatcagccacctggagagggaggtggacccctgcgtg

SEQ ID NO: 18771 - RNA, 243 nt, synthetic construct
  source 1..243: mol_type = other RNA
atggacatggcccaggagcccgtgaccttcagggacgtggccatctacttcagcagggaggagtgggcctgcctggagcccagccagaggaccctgtacagggacgtgatgctggacaacttcagcagcgtggccgccctgggcttctgcagccccaggcccgacctggtgagcaggctggagcagtgggaggagccctgggtggaggacagggagaggcccgagctgcaggccgtgaggagg

SEQ ID NO: 18772 - RNA, 243 nt, synthetic construct
  source 1..243: mol_type = other RNA
atggccgccctgttcctgagcgcccccccccaggccgaggtgaccttcgaggacgtggccgtgtacctgagcagggaggagtggggcaggctgggccccgcccagaggggcctgtacagggacgtgatgctggagacctacggcaacctggtgagcctgggcgtgggccccgccggccccaagcccggcgtgatcagccagctggagaggggcgacgagccctgggtgctggacgtgcagggc

SEQ ID NO: 18773 - RNA, 243 nt, synthetic construct
  source 1..243: mol_type = other RNA
atgcccgccaacgaggacgccccccagcccggcgagcacggcagcgcctgcgaggtgagcgtgagcttcgaggacgtgaccgtggacttcagcagggaggagtggcagcagctggacagcacccagaggaggctgtaccaggacgtgatgctggagaactacagccacctgctgagcgtgggcttcgaggtgcccaagcccgaggtgatcttcaagctggagcagggcgagggcccctggacc

SEQ ID NO: 18774 - RNA, 243 nt, synthetic construct
  source 1..243: mol_type = other RNA
atgaccctgctgaccttcagggacgtggccatcgagttcagcctggaggagtggaagtgcctggacctggcccagcagaacctgtacagggacgtgatgctggagaactacaggaacctgttcagcgtgggcctgaccgtgagcaagcccggcctgatcacctgcctggagcagaggaaggagccctggaacgtgaagaggcaggaggccgccgacggccaccccggctggagcgccgtggtg

SEQ ID NO: 18775 - RNA, 243 nt, synthetic construct
  source 1..243: mol_type = other RNA
atgagccagggcagcgtgaccttcagggacgtggccatcgacttcagccaggaggagtggaagtggctgcagcccgcccagagggacctgtacaggtgcgtgatgctggagaactacggccacctggtgagcctgggcctgagcatcagcaagcccgacgtggtgagcctgctggagcagggcaaggagccctggctgggcaagagggaggtgaagagggacctgttcagcggctggagcgcc

SEQ ID NO: 18776 - RNA, 243 nt, synthetic construct
  source 1..243: mol_type = other RNA
atgcccctgaaggcccagtaccaggagatggtgaccttcgaggacgtggccgtgcacttcaccaagaccgagtggaccggcctgagccccgcccagagggccctgtacaggagcgtgatgctggagaacttcggcaacctgaccgccctgggctaccccgtgcccaagcccgccctgatcagcctgctggagggcggcgacatggcctggggcctggaggcccaggacgacccccccgccgag

SEQ ID NO: 18777 - RNA, 243 nt, synthetic construct
  source 1..243: mol_type = other RNA
atggacaccgtggtgttcgaggacgtggtggtggacttcacccccgaggagtgggccctgctgaaccccgcccagaggaagctgtacagggacgtgatgctggagaccttcaagcacctggccagcgtggacaacgaggcccagctgaaggccagcggcagcatcagccagcaggacaccagcggcgagaagctgagcctgaagcagaagatcgagaagttcaccaggaagaacatctgggcc

SEQ ID NO: 18778 - RNA, 243 nt, synthetic construct
  source 1..243: mol_type = other RNA
tgcagccacaggagctgcagggaggaccccggcaccagcgagagcagggagatggaccccgtggccttcaaggacgtggccgtgaacttcacccaggaggagtgggccctgctggacatcagccagaggaagctgtacagggaggtgatgctggagaccttcaggaacctgaccagcatcggcaagaagtggaaggaccagaacatcgagttcgagtaccagaaccccaggaggaacttcagg

SEQ ID NO: 18779 - RNA, 243 nt, synthetic construct
  source 1..243: mol_type = other RNA
gacagcgtggccttcgaggacgtggccgtgaacttcacccaggaggagtgggccctgctggaccccagccagaagaacctgtacagggaggtgatgcaggagaccctgaggaacctgaccagcatcggcaagaagtggaacaaccagtacatcgaggacgagcaccagaaccccaagaggaacctgaggaggctgatcggcgagaggctgagcgagagcaaggagagccaccagcacggcgag

SEQ ID NO: 18780 - RNA, 243 nt, synthetic construct
  source 1..243: mol_type = other RNA
acctgcatggtgcacaggcagaccatgagctgcagcggcgccggcggcatcaccgccttcgtggccttcagggacgtggccgtggacttcacccaggaggagtggaggctgctgagccccgcccagaggaccctgcacagggaggtgatgctggagacctacaaccacctggtgagcctggagatccccagcagcaagcccaagctgatcgcccagctggagcagggcgaggagccctggagg

SEQ ID NO: 18781 - RNA, 243 nt, synthetic construct
  source 1..243: mol_type = other RNA
atgatgcaggcccaggagagcctgaccctggaggacgtggccgtggacttcacctgggaggagtggcagctgctgagccccgcccagaaggacctgtacagggacgtgatgctggagaactacagcaacctggtgagcgtgggctaccaggccagcaagcccgacgccttcagcaagctggagaggggcgaggagacctgcaccaccgaggacgagatctacagcaggatctgcagcgagatc

SEQ ID NO: 18782 - RNA, 243 nt, synthetic construct
  source 1..243: mol_type = other RNA
atggccctgacccagggccagctgagcttcagcgacgtggccatcgagttcagccaggaggagtggaagtgcctggaccccggccagaaggccctgtacagggacgtgatgctggagaactacaggaacctgatcagcctgggcatctgcctgcccgacctgagcgtgaccagcatcttcttcaccagcggcctgggcagggccaggctgcagggcggcagcctggccagggtgagcagggtg

SEQ ID NO: 18783 - RNA, 243 nt, synthetic construct
  source 1..243: mol_type = other RNA
atgaacaacagccagggcagggtgaccttcgaggacgtgaccgtgaacttcacccagggcgagtggcagaggctgaaccccgagcagaggaacctgtacagggacgtgatgctggagaactacagcaacctggtgagcgtgggccagagggagaccaccaagcccgacgtgatcctgaggctggagcagggcaaggagccctggagcgaggaggaggaggtgctgggcagcggcagggccgag

SEQ ID NO: 18784 - RNA, 243 nt, synthetic construct
  source 1..243: mol_type = other RNA
atgctgcccatcgtgcagctgtacccccagggcctggtgagcttcaaggacgtggccgtggacttcacccaggaggagtggcagcagctggaccccagccagaggaccctgtacagggacgtgatgctggagaactacagccacctggtgagcatgggctaccccgtgagcaagcccgacgtgatcagcaagctggagcagggcgaggagccctggatcatcaagggcgacatcagcaactgg

SEQ ID NO: 18785 - RNA, 243 nt, synthetic construct
  source 1..243: mol_type = other RNA
gccgacatcaccctgatgagccaggcccaggacagcaggagcatcctgttccaggagagcgtgaccttcgaggacgtggccgtgaacttcaccaacagggagtggcagtgcctgacctacgcccagaggcacctgtacaaggacgtgatgctggagaactacggcaacatggtgagcctgggcttccccttccccaagccccccctgatcagccacctggagagggaggtggacccctgcgtg

SEQ ID NO: 18786 - RNA, 243 nt, synthetic construct
  source 1..243: mol_type = other RNA
atgagggtgctgaccttcagggacgtggccgtggagttcagccccgaggagtgggagtgcctggacagcgcccagcagcacctgtacagggacgtgatgctggagaactacggcaacctgttcagcctgggcctggccatcttcaagcccgacctgatcacctacctggagcagaggaaggagccctggaacgccaggaggcagaagaccgtggccaagcaccccgccggcagcctgcacttc

SEQ ID NO: 18787 - RNA, 243 nt, synthetic construct
  source 1..243: mol_type = other RNA
atgcacctgaccgcctggccccagaagagcgtgaccttcgaggacgtggccgtgtacttcacccaggccgagtgggacggcctgagccccgcccagagggccctgtacagggacgtgatgctggagaactacggcaacgtggccagcctgggcttccccctgctgaagcccgccgtgatcagccagctggagggcggcggcgagctgggcggccccagccccctggccgccggcaccggcctg

SEQ ID NO: 18788 - RNA, 243 nt, synthetic construct
  source 1..243: mol_type = other RNA
atggccgccatgcccctgaaggccaggtaccaggagatggtgaccttcgaggacgtggccgtgcacttcaccaagaccgagtggaccggcctgagccccgcccagagggccctgtacaggagcgtgatgctggagaacttcggcaacctgaccgccctgggctaccccgtgcccaagcccgccctgatcagcctgctggagggcggcgacatggcctggggcctggaggcccaggacgacccc

SEQ ID NO: 18789 - RNA, 243 nt, synthetic construct
  source 1..243: mol_type = other RNA
atgcccctgaaggccaggtaccaggagatggtgaccttcgaggacgtggccgtgcacttcaccaagaccgagtggaccggcctgagccccgcccagagggccctgtacaggagcgtgatgctggagaacttcggcaacctgaccgccctgggctaccccgtgcccaagcccgccctgatcagcctgctggagggcggcgacatggcctggggcctggaggcccaggacgacccccccgccgag

SEQ ID NO: 18790 - RNA, 243 nt, synthetic construct
  source 1..243: mol_type = other RNA
atgggccccctgcagttcaaggacgtggccatcgagttcagcctggaggagtggcactgcctggacaccgcccagaggaacctgtacagggacgtgatgctggagaactacaggaacctggtgttcctgggcatcgtggtgagcaagcccgacctgatcgccaggctggagcagggcaagaagcccctgaccatgaagaggcacgagatggtggccaaccccagcggccccggcgtggtggtg

SEQ ID NO: 18791 - RNA, 243 nt, synthetic construct
  source 1..243: mol_type = other RNA
gaggagctggtgggccagaaccacggcatggagggcgaggcctgcaccggcggcgacgtgaccttcagcgacgtggccatcgacttcagccacgaggagtgggcctgcctggacaccgcccagagggacctgtacaaggacgtgatggtgcagaactacgagaacctggtgagcgtgggcctgagcgtgaccaagccctacgtgatcatgctgctggaggacggcaaggagccctggatgatg

SEQ ID NO: 18792 - RNA, 243 nt, synthetic construct
  source 1..243: mol_type = other RNA
atgatcgagtaccagatccccgtgagcttcaaggacgtggtggtgggcttcacccaggaggagtggcacaggctgagccccgcccagagggccctgtacagggacgtgatgctggagacctacagcaacctggtgagcgtgggctacgagggcaccaagcccgacgtgatcctgaggctggagcaggaggaggccccctggatcggcgaggccgcctgccccggctgccactgctggggcaag

SEQ ID NO: 18793 - RNA, 243 nt, synthetic construct
  source 1..243: mol_type = other RNA
atgaacatggagggcctggtgatgttccaggacctgagcatcgacttcagccaggaggagtgggagtgcctggacgccgcccagaaggacctgtacagggacgtgatgatggagaactacagcagcctggtgagcctgggcctgagcatccccaagcccgacgtgatcagcctgctggagcagggcaaggagccctggatggtgagcagggacgtgctgggcggctggtgcaggggcctggag

SEQ ID NO: 18794 - RNA, 243 nt, synthetic construct
  source 1..243: mol_type = other RNA
ctggcccccgaggaccacggcagcagctacgagggcagcgtgagcttcagggacgtggccatcgacttcagcagggaggagtggaggcacctggaccccagccagaggaacctgtacagggacgtgatgctggagacctacagccacctgctgagcgtgggctaccaggtgcccgaggccgaggtggtgatgctggagcagggcaaggagccctgggccctgcagggcgagaggcccaggcag

SEQ ID NO: 18795 - RNA, 243 nt, synthetic construct
  source 1..243: mol_type = other RNA
atggtgcacggcagcgtgaccttcagggacgtggccatcgacttcagccaggaggagtgggagtgcctgcagcccgaccagaggaccctgtacagggacgtgatgctggagaactacagccacctgatcagcctggccggcagcagcatcagcaagcccggcgtgatcaccctgctggagcaggagaaggagccctggatggtggtgaggaaggagaccagcaggtggtaccccgacctggag

SEQ ID NO: 18796 - RNA, 243 nt, synthetic construct
  source 1..243: mol_type = other RNA
atgaccaagttccaggaggccgtgaccttcaaggacgtggccgtggccttcaccgaggaggagctgggcctgctggacagcgcccagaggaagctgtacagggacgtgatgctggagaacttcaggaacctggtgagcgtgggccaccagagcttcaagcccgacgtgatcagccagctggagagggaggagaagctgtggatgaaggagctgcagacccagaggggcaagcacagcgagacc

SEQ ID NO: 18797 - RNA, 243 nt, synthetic construct
  source 1..243: mol_type = other RNA
atgctgcagaccgtgtggttccaggagcccgtgaccttcgaggacgtggccgtgtacttcacccagaacgagtgggccagcctgcaccccacccagagggccctgtacagggaggtgatgctggagaactacgccaacgtgaccagcctgagcgccttccccttccccaagcccgacctgatcttccagctggagcagggcgaggccgcctggggccccgacccctggaccctggccggcggc

SEQ ID NO: 18798 - RNA, 243 nt, synthetic construct
  source 1..243: mol_type = other RNA
atggagctgctgaccttcagggacgtggccatcgagttcagccccgaggagtggaagtgcctggaccccgaccagcagaacctgtacagggacgtgatgctggagaactacaggaacctggtgagcctgggcgtggccatcagcaaccccgacctggtgacctgcctggagcagaggaaggagccctacaacgtgaagatccacaagatcgtggccaggccccccgccgtgtgcagccacagc

SEQ ID NO: 18799 - RNA, 243 nt, synthetic construct
  source 1..243: mol_type = other RNA
atggccgccggccagagggaggccaggccccaggtgagcctgaccttcgaggacgtggccgtgctgttcaccagggacgagtggaggaagctggcccccagccagaggaacctgtacagggacgtgatgctggagaactacaggaacctgctgagcctgggcctgcccttcaccaagccccaggtgatcagcctgctgcagcagggcgaggacccctgggaggtggagaaggagggcagcggc

SEQ ID NO: 18800 - RNA, 243 nt, synthetic construct
  source 1..243: mol_type = other RNA
atggccgtggacctgctgagcgcccaggagagggtgaccttcagggacgtggccgtgttcttcagccaggacgagtggctgcacctggacagcgcccagagggccctgtacagggaggtgatgctggagaactacagcatcctggtgagcctgggcatccccttcagcatgcccaagctgatccaccagctgcagcagggcgaggacccctgcatggtggagagggaggtgcccagcgacacc

SEQ ID NO: 18801 - RNA, 243 nt, synthetic construct
  source 1..243: mol_type = other RNA
atggacatggcccaggagcccgtgaccttcagggacgtggccatctacttcagcagggaggagtgggcctgcctggagcccagccagagggccctgtacagggacgtgatgctggacaacttcagcagcgtggccgccctgggcttctgcagccccaggcccgacctggtgagcaggctggagcagtgggaggagccctgggtggaggactgggagaggcccgagctgcaggccgtgcagagg

SEQ ID NO: 18802 - RNA, 243 nt, synthetic construct
  source 1..243: mol_type = other RNA
atggccgccctgttcctgagcgccccccaccaggccaaggtgaccttcgaggacgtggccgtgtacctgagcagggaggagtggggcaggctgggccccgcccagaggggcctgtacagggacgtgatgctggagacctacggcaacctggtgagcctgggcgtgggccccgccggccccaagcccggcgtgatcagccagctggagaggggcgacgagccctgggtgctggacgtgcagggc

SEQ ID NO: 18803 - RNA, 243 nt, synthetic construct
  source 1..243: mol_type = other RNA
atggccatgagccaggagagcctgaccttcaaggacgtgttcgtggacttcaccctggaggagtggcagcagctggacagcgcccagaagaacctgtacagggacgtgatgctggagaactacagccacctggtgagcgtgggctacctggtggagaagcccgacgtgatcttcaggctgggccccggcgaggagagctggatggccgacggcggcacccccgtgaggacctgcgccggcgag

SEQ ID NO: 18804 - RNA, 243 nt, synthetic construct
  source 1..243: mol_type = other RNA
ggcgagagcctggagagcagggtgaccctgggcagcctgaccgccgagagccaggagctgctgaccttcaaggacgtgagcgtggacttcacccaggaggagtggggccagctggcccccgcccacaggaacctgtacagggaggtgatgctggagaactacggcaacctggtgagcgtgggctaccagctgagcaagcccggcgtgatcagccagctggagaagggcgaggagccctggctg

SEQ ID NO: 18805 - RNA, 243 nt, synthetic construct
  source 1..243: mol_type = other RNA
atggccaacgccaccggcagcggcgtggagcagaagttccagggcagcgtgagcttcaaggacgtgaccgtgggcttcacccaggaggagtggcagcacctggaccccagccagagggccctgtacagggacgtgatgctggagaactacagcaacctggtgagcgtgggctactgcgtgcacaagcccgaggtgatcttcaggctggagcagggcgaggagccctggaagctggaggaggag

SEQ ID NO: 18806 - RNA, 243 nt, synthetic construct
  source 1..243: mol_type = other RNA
atgaccctgctgaccttcagggacgtggccatcgagttcagcctggaggagtggaagtgcctggacctggcccagcagaacctgtacagggacgtgatgctggagaactacaggaacctgttcagcatcggcctgaccgtgagcaagcccggcctgatcacctgcctggagcagaggaaggagccctggaacgtgaagaggcaggaggccgtggacggccaccccggctggtgcagcggcgtg

SEQ ID NO: 18807 - RNA, 243 nt, synthetic construct
  source 1..243: mol_type = other RNA
atgagccagggcctggtgaccttcagggacgtggccatcgacttcagccaggaggagtggaagtggctgcagcccgcccagagggacctgtacaggtgcgtgatgctggagaactacggccacctggtgagcctgggcctgagcatcagcaagcccgacgtggtgagcctgctggagcagggcaaggagccctggctgggcaagagggaggtgaagagggacctgttcagcgtgagcgagagc

SEQ ID NO: 18808 - RNA, 243 nt, synthetic construct
  source 1..243: mol_type = other RNA
gcccccctgctggcccccaggcccggcgagaccaggcccggctgcaggaagcccggcgccgtgagcttcgccgacgtggccgtgtacttcagccccgaggagtggggctgcctgaggcccgcccagagggccctgtacagggacgtgatgagggagacctacggccacctgggcgccctgggcttccccggccccaagcccgccctgatcagctggatggagcaggagagcgaggcctggagc

SEQ ID NO: 18809 - RNA, 243 nt, synthetic construct
  source 1..243: mol_type = other RNA
atgcacctgaccgcctggccccagaagagcgtgaccttcgaggacgtggccgtgtacttcacccaggccgagtgggacggcctgagccccgcccagaggaccctgtacagggacgtgatgctggagaactacggcaacgtggccagcctgggcttccccctgctgaagcccgccgtgatcagccagctggagggcggcggcgagctgggcggccccagccccctggccgccggcaggggcctg

SEQ ID NO: 18810 - RNA, 243 nt, synthetic construct
  source 1..243: mol_type = other RNA
atgggccccctgcagttcagggacgtggccatcgagttcagcctggaggagtggcactgcctggacaccacccagaggaacctgtacagggacgtgatgctggagaactacaggaacctggtgttcctgggcatcgtggtgagcaagcccgacctgatcacctgcctggagcagggcaagaagcccctgaccatgaagaggcacgagatgatcgccaagccccccggccaggcccagtggctg

SEQ ID NO: 18811 - RNA, 243 nt, synthetic construct
  source 1..243: mol_type = other RNA
atgagccaggtgaccttcagcgacgtggccatcgacttcagccacgaggagtgggcctgcctggacagcgcccagagggacctgtacaaggacgtgatggtgcagaactacgagaacctggtgagcgtgggcctgagcatcaccaagccctacgtgatcatgctgctggaggacggcaaggagccctggatgatggagaagaagctgagcaaggtgtaccccttccccctgagccacagcgtg

SEQ ID NO: 18812 - RNA, 243 nt, synthetic construct
  source 1..243: mol_type = other RNA
atggcccagggcctggtgaccttcagggacgtggccatcgagttcagcctggaggagtggaagtgcctggagcccgcccagagggacctgtacagggaggtgaccctggagaacttcggccacctggccagcctgggcctgagcatcagcaagcccgacgtggtgagcctgctggagcagggcaaggagccctggatgatcgccaacgacgtgaccggcccctggtaccccgacctggagagc

SEQ ID NO: 18813 - RNA, 243 nt, synthetic construct
  source 1..243: mol_type = other RNA
atggcccaggagagcgtgatgttcagcgacgtgagcgtggacttcagccaggaggagtgggagtgcctgaacgacgaccagagggacctgtacagggacgtgatgctggagaactacagcaacctggtgagcatggccggccacagcgtgagcaagcccaacgtgatcagctacctggagcagggcaaggagccctggctggtggacagggagctgaccaggggccagtggcccgtgctggag

SEQ ID NO: 18814 - RNA, 243 nt, synthetic construct
  source 1..243: mol_type = other RNA
atggcccacctgatgatgttcagggacgtggccgtggacttcagccaggaggagtgggagtgcctggacctggagcagagggacctgtacagggacgtgatgctggagaactacagcaacatggtgagcctgggcctgtgcatctaccagcccgaggccttcagcctgctggagaagggcaaggacccctggaagatcctgagggacgagaccaggaggccctgccccgacatgcagagcagg

SEQ ID NO: 18815 - RNA, 243 nt, synthetic construct
  source 1..243: mol_type = other RNA
ctggcccccgacgaccacggcagcagctacgagggcagcgtgagcttcagggacgtggccatcgacttcagcagggaggagtggaggcacctggaccccagccagaggaacctgtacagggacgtgatgctggagacctacagccacctgctgagcgtgggctaccaggtgcccgaggccgaggtggtgatgctggagcagggcaaggagccctgggccctgcagggcgagaggcccaggcac

SEQ ID NO: 18816 - RNA, 243 nt, synthetic construct
  source 1..243: mol_type = other RNA
cacagggtgggcctgatcaggagctacaacagcaagaccatgacctgcttccaggagctggtgaccttcagggacgtggccatcgacttcagcaggcaggagtgggagtacctggaccccaaccagagggacctgtacagggacgtgatgctggagaactacaggaacctggtgagcctgggcggccacagcatcagcaagcccgtggtggtggacctgctggagaggggcaaggagccctgg

SEQ ID NO: 18817 - RNA, 243 nt, synthetic construct
  source 1..243: mol_type = other RNA
gaggagacccagggcgagctgaccagcagctgcggcagcaagaccatggccaacgtgagcctggccttcagggacgtgagcatcgacctgagccaggaggagtgggagtgcctggaccccgtgcagagggacctgtacaaggacgtgatgctggagaactacagcaacctggtgagcctgggctacaccatccccaagcccgacgtgatcaccctgctggagcaggagaaggagccctggatc

SEQ ID NO: 18818 - RNA, 243 nt, synthetic construct
  source 1..243: mol_type = other RNA
atgaccaaggcccaggagagcctgaccctgaaggacgtggccgtggacttcacctgggaggagtggcagctgctgggccccgcccagaagaggctgtacagggacgtgatgctggagaactacagcaacctggtgagcgtgggctaccaggccagcaagcccgacgccctgaccaagctggagcagggcgagcccctgtggaccctggaggacgagatccacagccccgcccaccccgagatc

SEQ ID NO: 18819 - RNA, 243 nt, synthetic construct
  source 1..243: mol_type = other RNA
atgatcaacgcccaggagctgctgaccctggaggacgtgaccgtggagttcacctgggaggagtggcagctgctggaccccttccagaaggacctgtacagggacgtgaccctggagatctacagcaacctggtgagcatgggctaccaggtgagcaagcccgacgccctgagcaagctggagcagggcgaggagccctggaccatggaggacgagaggcacagcaggatctgccccggcacc

SEQ ID NO: 18820 - RNA, 243 nt, synthetic construct
  source 1..243: mol_type = other RNA
gagggcgaggcccagaagaggaaggccgaggagagcggcatgcccctgacccagggccacctgaccttcagggacgtggccatcgagttcagccaggaggagtggaagtgcctggaccccgtgcagaaggccctgtacagggacgtgatgctggagaactacaggaacctggtgagcctgggcatctgcctgcccgacctgagcatcttcagcatgatgaagcagaggaccgagagctggacc

SEQ ID NO: 18821 - RNA, 243 nt, synthetic construct
  source 1..243: mol_type = other RNA
atgaacgtggaggtggtgaaggtgatgccccaggacctggtgaccttcaaggacgtggccatcgacttcagccaggaggagtggcagtggatgaaccccgcccagaagtgcctgtacaggagcatgatgctggagaactaccagagcctggtgagcctgggcctgtgcatcagcaagccctacgtgatcagcctgctggagcagggcagggagccctgggagatgaccagcgagatgaccagg

SEQ ID NO: 18822 - RNA, 243 nt, synthetic construct
  source 1..243: mol_type = other RNA
atgaacagcgaggtgatcgtggaccccatccagggccaggtgaacttcgaggacgtgttcgtgtacttcagccaggaggagtgggtgctgctggacgaggcccagaggctgctgtacagggacgtgatgctggagaacttcgccctgatggccagcctgggccacaccagcttcatgagccacatcggcgccagcctggtgatgggcagcgagccctgggtgcccgactgggtggacatgatc

SEQ ID NO: 18823 - RNA, 243 nt, synthetic construct
  source 1..243: mol_type = other RNA
atgggcccccagggcgccaggaggcaggccttcctggccttcggcgacgtgaccgtggacttcacccagaaggagtggaggctgctgagccccacccagagggccctgtacagggaggtgaccctggagaactacagccacctggtgagcctgggcatcctgcacagcaagcccgagctgatcaggaggctggagcagggcgaggccccctggggcgaggagaggaggaggaggcccggcccc

SEQ ID NO: 18824 - RNA, 243 nt, synthetic construct
  source 1..243: mol_type = other RNA
atggccgccgtgagccccaccaccaggtgccaggagagcgtgaccttcgaggacgtggccgtggtgttcaccgacgaggagtggagccacctggtgcccacccagagggacctgtacaaggaggtgatgctggagaactacaacagcatcgtgagcctgggcctgcccgtgccccagcccgacgtgatcttccagctgaagaggggcgacaagccctggatggtggacctgcacggcagcgag

SEQ ID NO: 18825 - RNA, 243 nt, synthetic construct
  source 1..243: mol_type = other RNA
atgatgaccgccgtgagcctgaccaccaggccccaggagagcgtggccttcgaggacgtggccgtgtacttcaccaccaaggagtgggccatcatggtgcccgccgagagggccctgtacagggacgtgatgctggagaactacgaggccgtggccttcgtggtgagccccaccagcaagcccgccctggtgagccacctggagcagggcaaggagagctgcttcaccaggccccagggcgtg

SEQ ID NO: 18826 - RNA, 243 nt, synthetic construct
  source 1..243: mol_type = other RNA
atgttcccccccgccaggggcaaggagctgctgagcttcgaggacgtggccatgtacttcaccagggaggagtggggccacctgagctggggccagaaggacctgtacagggacgtgatgctggagaactacaggaacatggtgctgctgggcttccagttccccaagcccgaggtgatctgccagctggagaactgggacgagcagtggatcctggacctgcccagggccggcaacaggaag

SEQ ID NO: 18827 - RNA, 243 nt, synthetic construct
  source 1..243: mol_type = other RNA
caggaccccagcgccgagggcctgagcgaggaggtgcccgtggtgttcgaggagctgcccgtggtgttcgaggacgtggccgtgtacttcaccagggaggagtggggcatgctggacaagtggcagaaggagctgtacagggacgtgatgaggatgaactacgagctgctggccagcctgggccccgccgccgccaagcccgacctgatcagcaagctggagaggagggccgccccctggatc

SEQ ID NO: 18828 - RNA, 243 nt, synthetic construct
  source 1..243: mol_type = other RNA
atggccgccggccagagggaggccaggccccaggtgagcctgaccttcgaggacgtggccgtgctgttcaccagggacgagtggaggaagctggcccccagccagaggaacctgtacagggacgtgatgctggagaactacaggaacctggtgagcctgggcctgcccttcaccaagcccaaggtgatcagcctgctgcagcagggcgaggacccctggaaggtggagaaggacagcagcggc

SEQ ID NO: 18829 - RNA, 243 nt, synthetic construct
  source 1..243: mol_type = other RNA
atggccggcgaggccgaggcccagctggaccccagcctgcagggcctggtgatgttcgaggacgtgaccgtgtacttcagcagggaggagtggggcctgctgaacgtgacccagaagggcctgtacagggacgtgatgctggagaacttcgccctggtgagcagcctgggcctggcccccagcaggagccccgtgttcacccagctggaggacgacgagcagagctgggtgcccaactgggtg

SEQ ID NO: 18830 - RNA, 243 nt, synthetic construct
  source 1..243: mol_type = other RNA
atggccgccgccgccgccctgagggcccacgcccagagcagcgtgaccttcgaggacgtggccgtgaacttcagcatggaggagtggagcctgctgaacgaggcccagaggtgcctgtacagggacgtgatgctggagaccctgaccctgatcagcagcctgggctgctggcacggcggcgaggacgaggccgcccccagcaagcagagcacctgcatctacatctacaaggagcagggcggc

SEQ ID NO: 18831 - RNA, 243 nt, synthetic construct
  source 1..243: mol_type = other RNA
atggccgccgccgccctggtgaacaccccccagggccacgtgaccttcgaggacatcgccgtgtacttcagccaggaggagtggggcctgctggacgaggcccagaggtgcctgtaccacgacgtgatgctggagaacttcagcctgatggccagcgtgggctgcctgcacggcatcgaggccgaggaggcccccagcgagcagaccgtgagcgcccagggcgccagccaggccaggaccccc

SEQ ID NO: 18832 - RNA, 243 nt, synthetic construct
  source 1..243: mol_type = other RNA
atggccgccgccgccctgagggaccccgcccagcagggctacgtgaccttcgaggacgtggccgtgtacttcagccaggaggagtggaggctgctggacgaggcccagaagctgctgtacaggaacgtgatgctggagaacttcagcctgctggccagcctgggcctggccagcagcaagacccacgagatcacccagctggagagctgggaggagcccttcatgcccgcctgggaggtggtg

SEQ ID NO: 18833 - RNA, 243 nt, synthetic construct
  source 1..243: mol_type = other RNA
atggccgccgccgccctgagggaccccgcccagcagggctacgtgaccttcgaggacgtggccgtgtacttcagccaggaggagtggaggctgctggacgaggcccagaagctgctgtacaggaacgtgatgctggagaacttcagcctgctggccagcctgggcctggccagcagcaagacccacgagatcacccagctggagagctgggaggagcccttcatgcccgcctgggaggccgtg

SEQ ID NO: 18834 - RNA, 243 nt, synthetic construct
  source 1..243: mol_type = other RNA
atgagcctgggcagcgagctgttcagggacgtggccatcgtgttcagccaggaggagtggcagtggctggcccccgcccagagggacctgtacagggacgtgatgctggagacctacagcaacctggtgagcctgggcctggccatcagcaagcccgacgtgatcagcttcctggagcagggcaaggagccctggatggtggagagggtggtgagcaggggcctgtgccccgtgctggagagc

SEQ ID NO: 18835 - RNA, 243 nt, synthetic construct
  source 1..243: mol_type = other RNA
atggccctgaggagcgtgatgttcagcgacgtgagcatcgacttcagccccgaggagtgggagtacctggacctggagcagaaggacctgtacagggacgtgatgctggagaactacagcaacctggtgagcctgggctgcttcatcagcaagcccgacgtgatcagcctgctggagcagggcaaggagccctggaaggtggtgaggaagggcaggaggcagtaccccgacctggagaccagg

SEQ ID NO: 18836 - RNA, 243 nt, synthetic construct
  source 1..243: mol_type = other RNA
atgggcctgctgaccttcagggacgtggccatcgagttcagcctggaggagtggcagtgcctggacaccgcccagaagaacctgtacaggaacgtgatgctggagaactacaggaacctggccttcctgggcatcgccgtgagcaagcccgacctgatcatctgcctggagaaggagaaggagccctggaacatgaagaggcacgagatggtggacgagccccccggcctggccgtgagcaac

SEQ ID NO: 18837 - RNA, 243 nt, synthetic construct
  source 1..243: mol_type = other RNA
atggagcccctgaagttcagggacgtggccatcgagttcagcctggaggagtggcagtgcctggacagcatccagcagaacctgtacaggaacgtgatgctggagaactacaggaacctggtgttcctgggcatcgccgccagcaagcccgacctgatcatctgcctggagcaggagaaggagccctggagcaggaagaggaggaggatggtggccgagctgcccgtgatctgcagccacttc

SEQ ID NO: 18838 - RNA, 243 nt, synthetic construct
  source 1..243: mol_type = other RNA
atgggcctgctgaccttcagggacgtggccatcgagttcagcctggaggagtggcagtgcctggacaccgcccagcagaacctgtacaggaacgtgatgctggagaactacaggaacctggccttcctgggcatcgccgtgagcaagcccgacctgatcacctgcctggagcagggcaaggagccctggaacatgaagaggcacgagatggtggacgagccccccggcgtgtgcccccacttc

SEQ ID NO: 18839 - RNA, 243 nt, synthetic construct
  source 1..243: mol_type = other RNA
atgagcggcccccccggcagcctggagatggagcccctgcagttcagggacgtggccgtggagttcagcctggaggagtggcactgcctggacaccgcccagcagaacctgtacagggacgtgatgctggagaactacaggcacctggtgttcctgggcatcgtggtgagcaagcccgacctgatcacctgcctggagcagggcaagaagcccctgaccatgaagaggcacgagatgatcgcc

SEQ ID NO: 18840 - RNA, 243 nt, synthetic construct
  source 1..243: mol_type = other RNA
atgggccccctgcagttcagggacgtggccatcgagttcagcctggaggagtggcactgcctggacaccgcccagaggaacctgtacaggaacgtgatgctggagaactacagcaacctggtgttcctgggcatcgtggtgagcaagcccgacctgatcaccaggctggagcagggcaagaagcccctgaccatgaagaggcacgagatggtggccaaccccagcggccccggcgtgttcgtg

SEQ ID NO: 18841 - RNA, 243 nt, synthetic construct
  source 1..243: mol_type = other RNA
atgatgttccaggacagcgtggccttcgaggacgtggccgtgaccttcacccaggaggagtgggccctgctggaccccagccagaagaacctgtacagggacgtgatgcaggagaccttcaagaacctggccagcatcggcaagaagtggaaggcccagaacatctacgtggagtacaagaacctgaggaggaacctgaggatcgtgggcgagaggctgttcgagagcaaggagggccaccag

SEQ ID NO: 18842 - RNA, 243 nt, synthetic construct
  source 1..243: mol_type = other RNA
atggacagcgtggccttcgaggacgtggccatcaacttcacctgcgaggagtgggccctgctgggccccagccagaagagcctgtacagggacgtgatgcaggagaccatcaggaacctggactgcatcggcatgacctggcagacccacgacatcgaggaggaccagtacaaggacctgaggaggaacctgaggtgccacatggtggagaggagctgcgagatcaaggacaacagccagtgc

SEQ ID NO: 18843 - RNA, 243 nt, synthetic construct
  source 1..243: mol_type = other RNA
atgatcaagagccaggagagcctgaccctggaggacgtggccgtggagttcacctgggaggagtggcagctgctgggccccgcccagaaggacctgtacagggacgtgatgctggagaactacagcaacctggtgagcgtgggctaccaggccagcaagcccgacgccctgttcaagctggagcagggcgagccctggaccgtggagaacgacagccacatctgccccgagatcaagaaggtg

SEQ ID NO: 18844 - RNA, 243 nt, synthetic construct
  source 1..243: mol_type = other RNA
atgatgcaggcccaggagagcctgaccctggaggacgtggccgtggacttcacctgggaggagtggcagttcctgagccccgcccagaaggacctgtacagggacgtgatgctggagaactacagcaacctggtggccgtgggctaccaggccaggaagcccgacgccctgagcaagctggagaggggcgaggagccctgcaccaccgaggacgagatctacgccaggatctgcagcgacagc

SEQ ID NO: 18845 - RNA, 243 nt, synthetic construct
  source 1..243: mol_type = other RNA
atggagagcctgaccctggaggacgtggccgtggacttcacctgggaggagtggcagttcctgagccccgcccagaaggacctgtacagggacgtgatgctggagaactacagcaacctggtggccgtgggctaccaggccaggaagcccgacgccctgagcaagctggagaggggcgaggagccctgcaccaccgaggacgagatctacgccaggatctgcagcgacagcggcggcgccagc

SEQ ID NO: 18846 - RNA, 243 nt, synthetic construct
  source 1..243: mol_type = other RNA
atgatcaacgcccaggagctgctgaccctggaggacgtgaccgtggagttcacctgggaggagtggcagctgctggaccccttccagaaggacctgtacagggacgtgatgctggagatctacagcaacctggtgagcatcggctaccaggtgagcaagcccgacgccctgagcaagctggagaggggcgaggagccctggaccgtggaggacgagaggcacagccagatctgccccgagaac

SEQ ID NO: 18847 - RNA, 243 nt, synthetic construct
  source 1..243: mol_type = other RNA
atgagccagggcagcgtgaccttcagggacgtggccatcgacttcagccaggaggagtggaagtggctgcagcccgcccagagggacctgtacaggtgcgtgatgctggagaactacggccacctggtgagcctgggcctgagcatcagcaagcccgacgtggtgagcctgctggagcagggcaaggagccctggctgggcaagagagacgtgaagagggacctgttcagcgtgctgaaggag

SEQ ID NO: 18848 - RNA, 243 nt, synthetic construct
  source 1..243: mol_type = other RNA
atggcccacgccctggtgaccttcagggacgtggccatcgacttcagccagaaggagtgggagtgcctggacaccacccagaggaagctgtacagggacgtgatgctggagaactacaacaacctggtgagcctgggctacagcggcagcaagcccgacgtgatcaccctgctggagcagggcaaggagccctgcatggccgccagggacgtgaccggcaggcagtaccccggcctgctgagc

SEQ ID NO: 18849 - RNA, 243 nt, synthetic construct
  source 1..243: mol_type = other RNA
atgatcgagtaccagatccccgtgagcttcaaggacgtggtggtgggcttcacccaggaggagtggcaccagctgagccccgcccagagggccctgtacagggacgtgatgctggagacctacagcaacctggtgagcgtgggctacgagggcaccaagcccgacgtgatcctgaggctggagcaggaggaggccccctggatcggcgaggccgcctgcctgggctgccactgctgggaggac

SEQ ID NO: 18850 - RNA, 243 nt, synthetic construct
  source 1..243: mol_type = other RNA
atgatcgagtaccagatccccgtgagcttcaaggacgtggtggtgggcttcacccaggaggagtggcaccagctgagccccgcccagagggccctgtacagggacgtgatgctggagacctacagcaacctggtgagcgtgggctacgagggcaccaagcccgacgtgatcctgaggctggagcaggaggaggccccctggatcggcgaggccgcctgcctgggctgccactgctggggcatc

SEQ ID NO: 18851 - RNA, 243 nt, synthetic construct
  source 1..243: mol_type = other RNA
atgatcgagtaccagatccccgtgagcttcaaggacgtggtggtgggcttcacccaggaggagtggcaccagctgagccccgcccagagggccctgtacagggacgtgatgctggagacctacagcaacctggtgagcgtgggctacgagggcaccaagcccgacgtgatcctgaggctggagcaggaggaggccccctggatcggcgaggccgcctgcctgggctgccactgctggggcaag

SEQ ID NO: 18852 - RNA, 243 nt, synthetic construct
  source 1..243: mol_type = other RNA
ctggcccccgaggaccacggcagcagctacgagggcagcgtgagcttcagggacgtggccatcgacttcagcagggaggagtggaggcacctggacctgagccagaggaacctgtacagggacgtgatgctggagacctacagccacctgctgagcgtgggctaccaggtgcccgaggccgaggtggtgatgctggagcagggcaaggagccctgggccctgcagggcgagaggcccaggcac

SEQ ID NO: 18853 - RNA, 243 nt, synthetic construct
  source 1..243: mol_type = other RNA
atgaacatggagggcctggtgatgttccaggacctgagcatcgacttcagccaggaggagtgggagtgcctggacgccgcccagaaggacctgtacagggacgtgatgatggagaactacagcagcctggtgagcctgggcctgagcatccccaagcccgacgtgatcagcctgctggagcagggcaaggagccctggatggtgagcagggacatgctgggcggctggtgccccgacagcgag

SEQ ID NO: 18854 - RNA, 243 nt, synthetic construct
  source 1..243: mol_type = other RNA
acccagcccgacgaggacctgcacctgcaggtggaggagacccagctggtgaaggagagcgtgaccttcaaggacgtggccatcgacttcaccctggaggagtggaggctgatggaccccacccagaggaacctgcacaaggacgtgatgctggagaactacaggaacctggtgagcctgggcctggccgtgagcaagcccgacatgatcagccacctggagaacggcaagggcccctgggtg

SEQ ID NO: 18855 - RNA, 243 nt, synthetic construct
  source 1..243: mol_type = other RNA
atgggcctggtgagcttcaaggacgtggccgtggacttcacccaggaggagtggcagcagctggaccccagccagaggaccctgtacagggacgtgatgctggagaactacagccacctggtgagcatgggctaccccgtgagcaagcccgacgtgatcagcaagctggagcagggcgaggagccctggatcatcaagggcgacatcagcaactggatctaccccgacgagtaccaggccgac

SEQ ID NO: 18856 - RNA, 243 nt, synthetic construct
  source 1..243: mol_type = other RNA
atccacctgaccgcctggccccagaagagcgtgaccttcgaggacgtggccgtgtacttcacccaggccgagtgggacggcctgagccccgcccagaggaccctgtacagggacgtgatgctggagaactacggcaacgtggccagcctgggcttccccctgctgaagcccgccgtgatcagccagctggagggcggcggcgacctgggcggccccagccccctggccgccggcaccggcctg

SEQ ID NO: 18857 - RNA, 243 nt, synthetic construct
  source 1..243: mol_type = other RNA
atggccgccatgcccctgaaggccaggtaccaggagatggtgaccttcgaggacgtggccgtgcacttcaccaagaccgagtggaccggcctgagccccgcccagagggccctgtacaggagcgtgatgctggagaacttcggcaacctgaccgccctgggctaccccgtgcccaagcccgccctgatcagcctgctggagggcggcgacatggactggggcctggaggcccaggacgacccc

SEQ ID NO: 18858 - RNA, 243 nt, synthetic construct
  source 1..243: mol_type = other RNA
atggtgaccttcgaggacgtggccgtgcacttcaccaagaccgagtggaccggcctgagccccgcccagagggccctgtacaggagcgtgatgctggagaacttcggcaacctgaccgccctgggctaccccgtgcccaagcccgccctgatcagcctgctggagggcggcgacatggactggggcctggaggcccaggacgacccccccgccgagaggaccaagaacgtgtgcaaggtgatc

SEQ ID NO: 18859 - RNA, 243 nt, synthetic construct
  source 1..243: mol_type = other RNA
atgcccctgaaggccaggtaccaggagatggtgaccttcgaggacgtggccgtgcacttcaccaagaccgagtggaccggcctgagccccgcccagagggccctgtacaggagcgtgatgctggagaacttcggcaacctgaccgccctgggctaccccgtgcccaagcccgccctgatcagcctgctggagggcggcgacatggactggggcctggaggcccaggacgacccccccgccgag

SEQ ID NO: 18860 - RNA, 243 nt, synthetic construct
  source 1..243: mol_type = other RNA
cccgcccagggccccggcgaggccaggcccagcaggaagaggggcaggaggcccagggccctgaagttcgtggacgtggccgtgtacttcagccccgaggagtggggctgcctgaggcccgcccagagggccctgtacagggacgtgatgagggagacctacggccacctgggcgccctgggctgcgccggccccaagcccgccctgatcagctggctggagaggaacaccgacgactgggag

SEQ ID NO: 18861 - RNA, 243 nt, synthetic construct
  source 1..243: mol_type = other RNA
gccgacatcaccctgatgagccaggcccaggacagcaggagcatcctgttccaggagagcgtgaccttcgaggacgtggccgtgaacttcaccaacagggagtggcagtgcctgacctacgcccagaggcacctgtacaaggacgtgatgctggagaactacaggaacatggccagcctgggcttccccttccccaagccccccctgatcagccacctggagagggaggtggacccctgcgtg

SEQ ID NO: 18862 - RNA, 243 nt, synthetic construct
  source 1..243: mol_type = other RNA
atgcccggcccccccggcagcctggagatgggcgtgctgaccttcagggacgtggccatcgagttcagcctggaggagtggcagtgcctggacatcacccagcagaacctgtacaggaacgtgatgctggagaactacaggaacctggtgttcgtgggcatcgccgccagcaagcccgacctgatcacctgcctggagcagggcaaggagccctggaacgtgaagaggcacgagatggtggcc

SEQ ID NO: 18863 - RNA, 243 nt, synthetic construct
  source 1..243: mol_type = other RNA
atgatgaccgccgtgagcctgaccaccaggccccaggagagcgtggccttcgaggacgtggccgtgtacttcaccgccaaggagtgggacatcatggtgcccgccgagagggccctgtacagggacgtgatgctggagaactacgaggccgtggccttcgtggtgccccccaccagcaagcccgccctggtgagccacctggagcagggcaaggagagctgcttcaccaggccccagggcgtg

SEQ ID NO: 18864 - RNA, 243 nt, synthetic construct
  source 1..243: mol_type = other RNA
atggcccacatggccttcagggacgtggccgtggacttcacccaggacgagtggaggctgctgagccccgcccagaggaccctgtacagggaggtgatgctggagaactacagcaacctggtgagcctgggcatcagcttcagcaagcccgagctgatcacccagctggagcagggcaaggagacctggagggaggagaagaactgcagccccgccacctgccccgccgaccccgagcccgag

SEQ ID NO: 18865 - RNA, 243 nt, synthetic construct
  source 1..243: mol_type = other RNA
atgagccagggcagcgtgaccttcagggacgtggccatcgacttcagccaggaggagtggaagtggctgcagcccgcccagagggacctgtacaggtgcgtgatgctggagaactacggccacctggtgagcctgggcctgagcatcagcaagcccgacgtggtgagcctgctggagcagggcaaggagccctggctgggcaagaggaacgtgaacagggacctgttcagcgtgagcgagagc

SEQ ID NO: 18866 - RNA, 243 nt, synthetic construct
  source 1..243: mol_type = other RNA
atggccgccgtgagccccaccaccaggtgccaggagagcgtgaccttcgaggacgtggccgtggtgttcaccgacgaggagtggagccacctggtgcccatccagagggacctgtacaaggaggtgatgctggagaactacaacagcatcgtgagcctgggcctgcccgtgccccagcccgacgtgatcttccagctgaagaggggcgacaagccctgggtggtggacctgcacggcagcgag

SEQ ID NO: 18867 - RNA, 243 nt, synthetic construct
  source 1..243: mol_type = other RNA
accctgctgaccttcagggacgtggccatcgagttcagcctggaggagtggaagtgcctggaccccgcccagcagaacctgtacagggacgtgatgctggagaactacaggaacctgttcagcatcggcctgaccgtgagcaagcccggcctgatcacctgcctggagcagaggaaggagccctggaacgtgaagaggcaggaggccgtggacggccaccccgccatgagcagccacgtgacc

SEQ ID NO: 18868 - RNA, 243 nt, synthetic construct
  source 1..243: mol_type = other RNA
atggcccccggcctgctgaccaccagggaggaggccctgatggccttcagggacgtggccgtggccttcacccagaaggagtggaagctgctgagcagcgcccagaggaccctgtacagggaggtgatgctggagaactacagccacctggtgagcctgggcatcgccttcagcaagcccaagctgatcgagcagctggagcagggcaacgagccctggagggaggagaacgagcacctgctg

SEQ ID NO: 18869 - RNA, 243 nt, synthetic construct
  source 1..243: mol_type = other RNA
atggacagcgtggccttcgaggacgtggccgtgaccttcacccaggaggagtgggccctgctggaccccagccagaagaccctgtacagggacgtgatgcaggagaccttcaggaacctggccagcgtgggcaagaagtggaaggcccagaacatgtacgtggagtacgagaacctgaagaggaacctgaggaccttcgtgggcgagaggctgttcgagagcaaggagggccaccagcacggc

SEQ ID NO: 18870 - RNA, 243 nt, synthetic construct
  source 1..243: mol_type = other RNA
atggacagcgtggccttcgaggacgtggccgtgaacttcacccaggaggagtgggccctgctgagccccagccagaagaacctgtacagggacgtgatgctggaggccttcaggaacctggccagcgtgggcatccagtggaaggaccaggacaccgagaacctgtaccagaacctgggcatcaagctgaggcacatgagggcccacgccggccacaccaggagcgagtgcggcggcgagtgg

SEQ ID NO: 18871 - RNA, 243 nt, synthetic construct
  source 1..243: mol_type = other RNA
atgggcctgctgaccttcagggacgtggccatcgagttcagcctggaggagtggcagtgcctggacaccgcccagaagaacctgtacaggaacgtgatgctggagaactacaggaacctggccttcctgggcgtggccgtgagcaagcccgacctgatcatctgcctggagaaggacaaggagccctggaacatgaagaggcacgagatggtggacgagccccccggcctgaccgtgagcaac

SEQ ID NO: 18872 - RNA, 243 nt, synthetic construct
  source 1..243: mol_type = other RNA
atggagcccctgaagttcagggacgtggccgtggagttcagcctggaggagtggcagtgcctggacaccatccagcagaacctgtacaggaacgtgatgctggagaactacaggaacctggtgttcctgggcatcgccgtgagcaagcccgacctgatcacctgcctggagcaggagaaggagccctggaccaggaagaggcacaggatggtggccaagcccgtgacctgcagccacttcgcc

SEQ ID NO: 18873 - RNA, 243 nt, synthetic construct
  source 1..243: mol_type = other RNA
atggcccacttccagggcagcgtgaccttcgaggacgtggccatcgccttcagccagcaggagtgggagagcctggacagcagccagaggggcctgtacagggacgtgatgctggagaactacaggaacctggtgagcatgggccacagcctgagcaagccccacgtgatcgccctgctggagaggtggaaggagcccaaggtgaccgagaggaaggacggcaggaggtggtgcaccgacctg

SEQ ID NO: 18874 - RNA, 243 nt, synthetic construct
  source 1..243: mol_type = other RNA
atggcccacttccagggcagcgtgaccttcgaggacgtggccatcgccttcagccagcaggagtgggagagcctggacagcagccagaggggcctgtacagggacgtgatgctggagaactacaggaacctggtgagcatggccggccacagcctgagcaagccccacgtgatcgccctgctggagaggtggaaggagcccaaggtgaccgagaggaaggacggcaggaggtggtgcaccgac

SEQ ID NO: 18875 - RNA, 243 nt, synthetic construct
  source 1..243: mol_type = other RNA
atgaacatggagggcctggtgatgttccaggacctgttcatccacttcagccaggaggagtgggagtgcctggacgccgcccagaaggacctgtacagggacgtgatgatggagaactacagcagcctggtgagcctgggcctgtgcatccccaagcccgacgtgatcagcctgctggagcagggcaaggagccctggatggtgagcagggacgtgctgggcggctggtgccccgacagcgag

SEQ ID NO: 18876 - RNA, 243 nt, synthetic construct
  source 1..243: mol_type = other RNA
accatgagctgcagcagggccggcggcatcaccggctgcatcaagtacagcaccgccagcgtggccttcagggacgtggccgtggacttcacccaggaggagtggaggctgctgagccccgcccagaggaccctgcacagggaggtgatgctggagacctacaaccacctggtgagcctggagatccccagcagcaagcccaagctgatcgcccagctggagaggggcgaggagccctggagg

SEQ ID NO: 18877 - RNA, 243 nt, synthetic construct
  source 1..243: mol_type = other RNA
atgagcctgggcagcgagctgttcagggacgtggccatcgtgttcagccaggaggagtggcagtgcctggcccccgcccagagggacctgtacagggacgtgatgctggagacctacaacaacctggtgagcctgggcctggccatcagcaagcccgacgtgatcagcttcctggagcagggcaaggagccctggatggtggagagggtggtgagcggcggcctgtgccccgtgctggagagc

SEQ ID NO: 18878 - RNA, 243 nt, synthetic construct
  source 1..243: mol_type = other RNA
atgaacgtggaggtggtgaaggtgatgccccaggacctggtgaccttcaaggacgtggccatcgacttcagccaggaggagtggcagtggatgaaccccgcccagaagcacctgtacaggagcatgatgctggagaactaccagagcctggtgagcctgggcctgtgcatcagcaagccctgcgtgatcagcctgctggagcagggcagggagccctgggagatgaccagcgagatgaccagg

SEQ ID NO: 18879 - RNA, 243 nt, synthetic construct
  source 1..243: mol_type = other RNA
atggccaccgccctgaccgaccccgcccaggtgagcgtgaccttcgacgacgtggccgtgaccttcacccaggaggagtggggccagctggacctggcccagaggaccctgtaccaggaggtgatgctggagaactgcggcctgctggtgagcctgggctgccccgtgcccaggcccgagctgatctaccacctggagcacggccaggagccctggaccaggaaggaggacctgagccaggac

SEQ ID NO: 18880 - RNA, 243 nt, synthetic construct
  source 1..243: mol_type = other RNA
atggccttcgaggacgtggccgtgtacttcagccaggaggagtggggcctgctggacaccgcccagagggccctgtacaggcacgtgatgctggagaacttcaccctggtgaccagcctgggcctgagcaccagcaggccccacgtggtgatccagctggagaggggcgaggagccctgggtgcccagcggcaaggacatgaccctggccaggaacacctacaggaggctgaacgccggcagc

SEQ ID NO: 18881 - RNA, 243 nt, synthetic construct
  source 1..243: mol_type = other RNA
atggccttcgaggacgtggccgtgtacttcagccaggaggagtggggcctgctggacaccgcccagagggccctgtacaggagggtgatgctggacaacttcgccctggtggccagcctgggcctgagcaccagcaggcccagggtggtgatccagctggagaggggcgaggagccctgggtgcccagcggcaccgacaccatcctgagcaggaacacctacaggaggaggaaccccggcagc

SEQ ID NO: 18882 - RNA, 243 nt, synthetic construct
  source 1..243: mol_type = other RNA
atgctgcagaccgcctggaggcaggagcccgtgaccttcgaggacgtggccgtgtacttcacccagaacgagtgggccagcctggacagcgtgcagagggccctgtacagggaggtgatgctggagaactacgccaacgtggccagcctggccttccccttcaccacccccgtgctggtgagccagctggagcagggcgagctgccctggggcctggacccctgggagcccatgggcagggag

SEQ ID NO: 18883 - RNA, 243 nt, synthetic construct
  source 1..243: mol_type = other RNA
atgatgaccgccgtgagcctgaccaccaggagccaggagagcgtggccttcgaggacgtggccgtgtacttcaccaccaaggagtgggccatcatggtgcccgccgagagggccctgtacagggacgtgatgctggagaactacgaggccgtggccttcgtggtgccccccaccagcaagcccgccctggtgagccacctggagcagggcaaggagagctgcttcatcaggccccagggcgtg

SEQ ID NO: 18884 - RNA, 243 nt, synthetic construct
  source 1..243: mol_type = other RNA
atggtgaccttcgaggacgtggccgtgcacttcaccaagaccgagtggaccggcctgagccccgcccagagggccctgtacaggagcgtgatgctggagaacttcggcaacctgaccgccctgggctaccccgtgcccaagcccgccctgatcagcctgctggagggcggcgacatggcctggggcctggaggcccaggacgacgcccccgccgagaggaccaagaacatctgcaagggcagg

SEQ ID NO: 18885 - RNA, 243 nt, synthetic construct
  source 1..243: mol_type = other RNA
atggtgaccttcgaggacgtggccgtgcacttcaccaagaccgagtggaccggcctgagccccgcccagagggccctgtacaggagcgtgatgctggagaacttcggcaacctgaccgccctgggctaccccgtgcccaagcccgccctgatcagcctgctggagggcggcgacatggcctggggcctggaggcccaggacgacgcccccgccgagaggaccaagaacatctgcaaggtgatc

SEQ ID NO: 18886 - RNA, 243 nt, synthetic construct
  source 1..243: mol_type = other RNA
atggagctgctgagcttcgaggacgtggccatgtacttcaccagggaggagtggggccacctggactggggccagaaggacctgtacagggacgtgatgctggagaactacaggaacatggtgctgctgggcttccagttccccaagcccgaggtgatctgccagctggagaactgggacgagcagtggatcctggacctgcccagggccggcagcaggaaggccagcggcagcgcctgcccc

SEQ ID NO: 18887 - RNA, 243 nt, synthetic construct
  source 1..243: mol_type = other RNA
caggaccccagcgccgagggcctgagcgaggaggtgcccgtggtgttcgaggagctgcccgtggtgttcgaggacgtggccgtgtacttcaccaggaaggagtggggcatgctggacaagaggcagaaggagctgtacagggacgtgatgaggatgaactacgagctgctggccagcctgggccccgccgccgccaagcccgacctgatcagcaagctggagaggagggccgccccctggatc

SEQ ID NO: 18888 - RNA, 243 nt, synthetic construct
  source 1..243: mol_type = other RNA
cccgtgaggggccccggcgaggccaggcccagcaggaagaggggcaggaggcccagggccctgaagttcgtggacgtggccgtgtacttcagcagcgaggagtggggctgcctgaggcccgcccagagggccctgtacagggacgtgatgagggagacctacggccacctgggcgccctgggctgcgccggccccaagcccgccctgatcagctggctggagaggaacaccgacgactgggag

SEQ ID NO: 18889 - RNA, 243 nt, synthetic construct
  source 1..243: mol_type = other RNA
accatgaccaccgtgagcagcaccgccaggccccaggagagcgtggccttcgacgacgtggccgtgtacttcaccaagaaggagtgggccatcatggtgcccgaccagagggccctgtacagggacgtgatgctggagaactacgaggccgtggccttcgtggtgccccccaccagcaagcccgccctgatcagccacctggagcagggcaaggagccctgcttcacccagccccagggcgtg

SEQ ID NO: 18890 - RNA, 243 nt, synthetic construct
  source 1..243: mol_type = other RNA
atgctgcagaccgcctggaggcaggagcccgtgaccttcgaggacgtggccgtgtacttcacccagaacgagtggaccagcctggaccccgtgcagagggccctgtacagggaggtgatgctggagaactacgccaacgtggccagcctggccttccccttcaccacccccgtgctggtgagccagctggagcagggcgagaggccctggggcctggacccctgggagcccgtgggcagggag

SEQ ID NO: 18891 - RNA, 243 nt, synthetic construct
  source 1..243: mol_type = other RNA
atgctgcagaccgcctggccccagaggctgagcaggaacctgtggttccaggagagcgtggccttcgaggacgtggccgtgtacttcacccagaaccagtgggccagcctggaccccgcccagagggccctgtacagggaggtgatgctggagaactacgccaacgtgaccagcctggtggccttccccttccccaagcccgccctgatcagccacctggagaagggcgaggccccctggggc

SEQ ID NO: 18892 - RNA, 243 nt, synthetic construct
  source 1..243: mol_type = other RNA
atggccgccggccagcccgaggccaggccccaggtgagcctgaccttcgaggacgtggccgtgctgttcaccagggacgagtggaggaagctggcccccagccagaggaacctgtacagggacgtgatgctggagaactacaggaacctggtgagcctgggcctgcccttcaccaagcccaaggtgatcagcctgctgcagcagggcgaggacccctggaaggtggagaaggactgcttcggc

SEQ ID NO: 18893 - RNA, 243 nt, synthetic construct
  source 1..243: mol_type = other RNA
atggccgccatccccctgaaggcccagtgccaggagaccgtgaccttcgaggacgtggccgtgcacttcaccaagaccgagtggaccggcctgagccccgcccagagggccctgtacaggagcgtgatgctggagaactacggcaacctgaccgccatgggctacctggtgcccaagcccgccctgatcagcctgctggagggcggcgacatggcctggggcctggaggcccaggacgacccc

SEQ ID NO: 18894 - RNA, 243 nt, synthetic construct
  source 1..243: mol_type = other RNA
tgcttcagcggcgaggagaggatggccgccggccacccccccaggtggccccaggagctggtgaccttcgaggacgtgagcgtggacttcagccaggaggagtgggagctgctggaccccgcccagaaggagctgtacagggaggtgaccctggagaactacaggaacctggtgagcctggaggccctgaagaacccctgcgccgacgccggcatggaggagggccccttcagcaccgcccac

SEQ ID NO: 18895 - RNA, 243 nt, synthetic construct
  source 1..243: mol_type = other RNA
atgttccaggacagcgtggccttcgaggacgtggccgtgaccttcacccaggaggagtgggccctgctggaccccagccagaagaccctgtacagggacgtgatgcaggagaacttcaggaacctggccagcgtgggcaagaagtggaaggcccagaacatctacgtggagtacaagaacctgaggaggaacctgaggaacctgatgggcaagaggctgttcgagagcaaggaggaccaccag

SEQ ID NO: 18896 - RNA, 243 nt, synthetic construct
  source 1..243: mol_type = other RNA
gacagcgtggccttcgaggacgtggccgtgaacttcacccaggaggagtgggccctgctggacaggagccagaagaagctgtacagggaggtgatgcaggagaccctgaggaacctgaccagcatcggcaagacctggagcaaccagaacgccgaggagaggcaccagaaccccaggaggaacctgaggaggctgatcggcgagaggctgttccagagcaaggagagccaccagcacgccgag

SEQ ID NO: 18897 - RNA, 243 nt, synthetic construct
  source 1..243: mol_type = other RNA
atggacaccgtggccctggaggacgtggccgtgaacttcacccaggaggagtgggccctgctgggccccagccagaagaagctgtacagggacgtgatgcaggagaccatcaggaacctggactgcatcaagatgatcagcgaggaccagaacatcgaggaccagtacaagaaccccaagaagaacctgaggtgcaggatggccgagaggctgagcgagagcaaggacaacagccagtgcggc

SEQ ID NO: 18898 - RNA, 243 nt, synthetic construct
  source 1..243: mol_type = other RNA
atgacccccggcccccccggcagcctggagatggagcccctgaccttcaaggacgtggccatcgagttctgcctggaggagtggcagtgcctggacaccgcccagcaggacctgtacaggaacgtgatgctggagaactacaggaacctggtgttcctgggcatcgccgtgagcaagcccgacctgatcacctgcctggagcagggcaaggtgccctggaacaggaagaggcacgagatggtg

SEQ ID NO: 18899 - RNA, 243 nt, synthetic construct
  source 1..243: mol_type = other RNA
atgaacatggagggcctggtgatgttccaggacctgagcatcgacttcagccaggaggagtgggagtgcctgaaccccgcccagaaggacctgtacagggacgtgatgatggagaactacagcagcctgctgagcctgggcctgagcatccccaagcccgacgtgatcagcctgctggagcagggcaaggagccctggatggtgagcagggacatcctgggcggctggtgccccgacaggctg

SEQ ID NO: 18900 - RNA, 243 nt, synthetic construct
  source 1..243: mol_type = other RNA
atggccctgaggagcgtgatcttcagcgacatcagcatcgacttcagccccgaggagtgggagtacctggacctggagcagaaggacctgtacagggacgtgatgctggagaactacagcaacctggtgagcctgggctgcttcatcagcaagcccgacgtgatcagcctgctggagcagggcaaggagccctggaaggtggtgaggaagaggaggaggcagtaccccgacctggagaccaag

SEQ ID NO: 18901 - RNA, 243 nt, synthetic construct
  source 1..243: mol_type = other RNA
atgatcaactaccagacccccgtgagcttcagggacgtggtggtgggcttcacccaggaggagtggcacaggctgaaccccacccagagggccctgtacagggacgtgatgctggagacctacagcaacctggtgagcgtgggctacgagggcaccaagcccgacgtgatcctgaggctggagcaggaggaggccccctggatcggcgaggccgcctgcctgggctgccactgctgggaggac

SEQ ID NO: 18902 - RNA, 243 nt, synthetic construct
  source 1..243: mol_type = other RNA
atgatcaactaccagacccccgtgagcttcagggacgtggtggtgggcttcacccaggaggagtggcacaggctgaaccccacccagagggccctgtacagggacgtgatgctggagacctacagcaacctggtgagcgtgggctacgagggcaccaagcccgacgtgatcctgaggctggagcaggaggaggccccctggatcggcgaggccgcctgcctgggctgccactgctggggcatc

SEQ ID NO: 18903 - RNA, 243 nt, synthetic construct
  source 1..243: mol_type = other RNA
atgatcaactaccagacccccgtgagcttcagggacgtggtggtgggcttcacccaggaggagtggcacaggctgaaccccacccagagggccctgtacagggacgtgatgctggagacctacagcaacctggtgagcgtgggctacgagggcaccaagcccgacgtgatcctgaggctggagcaggaggaggccccctggatcggcgaggccgcctgcctgggctgccactgctggggcaag

SEQ ID NO: 18904 - RNA, 243 nt, synthetic construct
  source 1..243: mol_type = other RNA
cacggcagcagctacgagggcagcgtgagcttcagggacgtggccatcaacttcagcagggaggagtggaggcacctggacctgagccagaggaacctgtactgggacgtgatgctggagacctacagccacctgctgagcgtgggctaccagttccccaagcccgaggtggtgatgctggagcagggcaacgagccctgggccctgcagggcgagaggcccaggcacagctgccccggcgag

SEQ ID NO: 18905 - RNA, 243 nt, synthetic construct
  source 1..243: mol_type = other RNA
atgaccaccctgaaggagaccgtgaccttcaaggacgtggccgtggtgttcaccgaggaggagctgcagctgctggaccccgcccagaagaagctgtaccaggacgtgatgctggagaacttcaggaacctgctgagcgtgggccaccagcccttccacggcgacaccttccacttccccagggaggagaagttctggatggtggagaccgccacccagaaggagggcaacctggacggcgtg

SEQ ID NO: 18906 - RNA, 243 nt, synthetic construct
  source 1..243: mol_type = other RNA
atggccctgacccagggccaggtgaccttcagggacgtggccatcgagttcagccaggaggagtggacctgcctggaccccgcccagaggagcctgtacagggacgtgatgctggagaactacaggaacctggccagcctgggcatcagctgcttcgacctgagcatcatcagcatgctggagcagggcaagggccccttcgccctggagagccaggtgcagagggccggcaaccccgacggc

SEQ ID NO: 18907 - RNA, 243 nt, synthetic construct
  source 1..243: mol_type = other RNA
atgcccctgggcagcgagctgttcagggacgtggccatcgtgttcagccaggaggagtggcagtggctggcccccgcccagagggacctgtacagggacgtgatgctggagacctacagcaacctggtgagcctgggcctggccatcagcaagcccgacgtgatcagcttcctggagcagggcaaggagccctggatggtggagagggtggtggccggcggcctgtgccccgaggccgagctg

SEQ ID NO: 18908 - RNA, 243 nt, synthetic construct
  source 1..243: mol_type = other RNA
atgcccctgggcagcgagctgttcagggacgtggccatcgtgttcagccaggaggagtggcagtggctggcccccgcccagagggacctgtacagggacgtgatgctggagacctacagcaacctggtgagcctgggcctggccatcagcaagcccgacgtgatcagcttcctggagcagggcaaggagccctggatggtggagagggtggtggccggcggcctgtgccccgtgctggagagc

SEQ ID NO: 18909 - RNA, 243 nt, synthetic construct
  source 1..243: mol_type = other RNA
atggccgccgccgccctgaggctgcccgcccagggcaccgtgaccttcgaggacgtggccgtgaagttcagccaggaggagtggagcatcctgaccgaggcccagaggtgcctgtaccacgacgtgatgctggagaacctggccctgatcagcagcctgggctgctggtacggcgccaaggacgagacccccagcaagcagaccctgagcatccagcagcagagccccctgaggagccactgg

SEQ ID NO: 18910 - RNA, 243 nt, synthetic construct
  source 1..243: mol_type = other RNA
atggccttcgaggacgtggccgtgtacttcagcgaggaggagtggggcctgctggacaccgcccagagggccctgtacaggcacgtgatgctggagaacttcaccctggtgaccagcctgggcctgagcaccagcaggcccctggtggtgatccagctggagaggggcgaggacccctgggtgcccagcgtgaaggacatgaccctggccaggaacgcctacggcaggaggaccaccggcagc

SEQ ID NO: 18911 - RNA, 243 nt, synthetic construct
  source 1..243: mol_type = other RNA
atggccttcgaggacgtggccgtgtacttcagccaggaggagtggggcctgctggacaccgcccagagggccctgtacaggagggtgatgctggacaacttcgccctggtggccagcctgggcctgagcaccagcaggcccagggtggtgatccagctggagaggggcgaggagccctgggtgcccagcgagaccgacatgaccatgagcaggaacacccacaggaggaggaaccccggcagc

SEQ ID NO: 18912 - RNA, 243 nt, synthetic construct
  source 1..243: mol_type = other RNA
atggccttcagggacgtggccgtggacttcacccaggacgagtggaggctgctgagccccgcccagaggaccctgtacagggaggtgatgctggagaactacagcaacctggtgagcctgggcatcagcttcagcaagcccgagatcatcacccagctggagcagggcaaggagacctggagggaggagaagaagtgcccccccgccacctgccccgccgaccccgagcccgagctgtgcctg

SEQ ID NO: 18913 - RNA, 243 nt, synthetic construct
  source 1..243: mol_type = other RNA
atggcccacatggccttcagggacgtggccgtggacttcacccaggacgagtggaggctgctgagccccgcccagaggaccctgtacagggaggtgatgctggagaactacagcaacctggtgagcctgggcatcagcttcagcaagcccgagatcatcacccagctggagcagggcaaggagacctggagggaggagaagaagtgcccccccgccacctgccccgaccccgagcccgagctg

SEQ ID NO: 18914 - RNA, 243 nt, synthetic construct
  source 1..243: mol_type = other RNA
ggcgagaacctggagagcagggtgaccctgggcagccccgccgccgagagccaggagctgctgaccttcaaggacgtgagcgtggacttcacccaggaggagtggggccagctggcccccgcccacaggaacctgtacagggaggtgatgctggagaactacggcaacctggtgagcgtgggctaccagctgagcaagcccggcctgatcagccagctggagaagggcgaggagccctggctg

SEQ ID NO: 18915 - RNA, 243 nt, synthetic construct
  source 1..243: mol_type = other RNA
atgaccatgctgcaggacagcttcagcttcgacgacctgagcgtggacttcacccagaaggagtggcagctgctggaccccagccagaagaacctgtacaaggacgtgatgctggagaactacagcagcctggtgagcctgggctacgaggccatgaagcccgacgtgatcttcaagctggagcagggcgaggagccctggatcggcgacgaggagatccccagcagctggagccccgacatc

SEQ ID NO: 18916 - RNA, 243 nt, synthetic construct
  source 1..243: mol_type = other RNA
atgagccagggcagcgtgaccttcagggacgtggccatcgacttcagccaggaggagtggaagtggctgcagcccgcccagagggacctgtacaggtgcgtgatgctggagaactacggccacctggtgagcctgggcctgagcatcagcaagcccgacgtggtgagcctgctggagcagggcaaggagccctggctgggcaagagggacgtgaagagggacctgttccccgtgagcgagagc

SEQ ID NO: 18917 - RNA, 243 nt, synthetic construct
  source 1..243: mol_type = other RNA
atgagccagggcagcgtgaccttcagggacgtggccatcgacttcagccaggaggagtggaagtggctgcagcccgcccagagggacctgtacaggtgcgtgatgctggagaactacggccacctggtgagcctgggcctgagcatcagcaagcccgacgtggtgagcctgctggagcagggcaaggagccctggctgggcaagagggacgtgaagagggacctgttccccgtgctgaaggag

SEQ ID NO: 18918 - RNA, 243 nt, synthetic construct
  source 1..243: mol_type = other RNA
atcagggagttcggcggcatgggcgccggcatcgccaacatctggagcttccagggcagcgtgaccttcagggacgtggccatcgacttcagccaggaggagtggaagtggctgcagcccgcccagagggacctgtacaggtgcgtgatgctggagaactacggccacctggtgagcctgggcctgagcatcagcaagcccgacgtggtgagcctgctggagcagggcaaggagccctggctg

SEQ ID NO: 18919 - RNA, 243 nt, synthetic construct
  source 1..243: mol_type = other RNA
atgcccgccaacgaggacaccccccagcccggcggccacggcagcgcctgcgaggtgagcgtgagcttcgaggacgtgaccgtggacttcagcagggaggagtggcagcagctggacagcacccagaggaggctgtaccaggacgtgatgctggagaactacagccacctgctgagcgtgggcttcgaggtgcccaagcccgaggtgatcttcaagctggagcagggcgagggcccctggacc

SEQ ID NO: 18920 - RNA, 243 nt, synthetic construct
  source 1..243: mol_type = other RNA
atgatcaccgcccagggccccgtgagcttcagggacgtgaccgtgggcttcacccaggaggagtggcagcacctggaccccgcccagaggaccctgtacagggacgtgatgatcgagaactacagccacctggtgagcgtgggctactgcatccccaagcccgaggtgatcctgaagctggagaagggcgaggagccctggatcagcgaggagaagttccccagccagagccacctggagctg

SEQ ID NO: 18921 - RNA, 243 nt, synthetic construct
  source 1..243: mol_type = other RNA
atgcacctgaccgcctggccccagaagagcgtgaccttcgaggacgtggccgtgtacttcacccaggccgagtgggacggcctgagccccgcccagaggaccctgtacagggacgtgatgctggagaactacggcaacgtggccagcctgggcttccccctgctgaagcccgccgtgatcagccagctggagggcggcggcgagctgggcggccccagccccctggccgccggcaccggcctg

SEQ ID NO: 18922 - RNA, 243 nt, synthetic construct
  source 1..243: mol_type = other RNA
atggcccacatggccttcagggacgtggccgtggacttcacccaggacgagtggaggctgctgagccccgcccagaggaccctgtacagggaggtgatgctggagaactacagcaacctggtgagcctgggcatcagcttcagcaagcccgagatcatcacccagctggagcagggcaaggagacctggagggaggagaagaagtgcccccccgccacctgccccgccgaccccgagcccgag

SEQ ID NO: 18923 - RNA, 243 nt, synthetic construct
  source 1..243: mol_type = other RNA
atgaacatggagggcctggtgatgttccaggacctgagcatcgacttcagccaggaggagtgggagtgcctgaaccccacccagaaggacctgtacagggacgtgatgatggagaactacagcagcctgctgagcctgggcctgagcatccccaagcccgacgtgatcagcctgctggagcagggcaaggagccctggatggtgagcagggacgtgctgggcggctggtgccccgacaggctg

SEQ ID NO: 18924 - RNA, 243 nt, synthetic construct
  source 1..243: mol_type = other RNA
atggcccaggagagcgtgatgttcagcgacgtgagcatcgacttcagccaggaggagtgggagtgcctgaacgacgaccagagggacctgtacagggacgtgatgctggagaactacagcaacctggtgagcatggccggccacagcatcagcaagcccaacgtgatcagctacctggagcagggcaaggagccctggctggtggacagggagctgaccaggggccagtggcccgccctggag

SEQ ID NO: 18925 - RNA, 243 nt, synthetic construct
  source 1..243: mol_type = other RNA
atggcccacaggagcgtgatgttcagcgacatcagcatcgacttcagccccgaggagtgggagtacctggacctggagcagaaggacctgtacagggacgtgatgctggagaactacagcaacctggtgagcctgggctgcttcatcagcaagcccgacgtgatcagcctgctggagcagggcaaggagccctggaaggtggtgaggaagaggaggaggcagtaccccgacctggagaccaag

SEQ ID NO: 18926 - RNA, 243 nt, synthetic construct
  source 1..243: mol_type = other RNA
atggcccacgacctggtgatgttcagggacgtggccgtggacttcagccaggaggagtgggagtgcctgaacagctaccagaggaacctgtacaaggacgtgatcctggagaactacagcaacctggtgagcctgggctgcagcatcagcaagcccgacgtgatcaccctgctggagcagggcaaggagccctggctggtggtgagggacgagaagaggaggtggagcctggcccccaccttc

SEQ ID NO: 18927 - RNA, 243 nt, synthetic construct
  source 1..243: mol_type = other RNA
atgatcaactaccagacccccgtgagcttcaaggacgtggtggtgggcttcacccaggaggagtggcacaggctgaaccccacccagagggccctgtacagggacgtgatgctggagacctacagcaacctggtgagcgtgggctacgagggcaccaagcccgacgtgatcctgaggctggagcaggaggaggccccctggatcggcgaggccgcctgcctgggctgccactgctgggaggac

SEQ ID NO: 18928 - RNA, 243 nt, synthetic construct
  source 1..243: mol_type = other RNA
ggcaggagccccaggaagaccgaccagttctgcaacagcaagaacatggtgcccggcagcgtgaccttcagggacgtggccatcgacttcagccaggaggagtgggagtgcctgcagcccgcccagaggaccctgtacagggacgtgatgctggagaactacagccacctgatcagcctgggcagcagcatcagcaagcccgacgtgatcaccctgctggagcaggagaaggagccctggatg

SEQ ID NO: 18929 - RNA, 243 nt, synthetic construct
  source 1..243: mol_type = other RNA
tgcggcatgttccaggtgagcgtggccttcgaggacgtggccgtgaccttcacccaggaggagtgggccctgctggaccccagccagaagaccctgtacagggacgtgatgcaggagaacttcaggaacctggccagcgtgggcaagaagtggaaggcccagaacatctacgtggagtacaagaacctgaggaggaacctgaggaacctgaggggcaagaggctgttcgagagcaaggaggac

SEQ ID NO: 18930 - RNA, 243 nt, synthetic construct
  source 1..243: mol_type = other RNA
accatgaccaccgtgagcagcaccgccaggccccaggagagcgtggccttcgacgacgtggccgtgtacttcaccaagaaggagtgggccatcatggtgcccgaccagagggccctgtacagggacgtgatgctggagaactacgaggccgtggccttcgtggtgccccccaccagcaagcccgccctggtgagccacctggagcagggcaaggagccctgcttcacccagccccagggcgtg

SEQ ID NO: 18931 - RNA, 243 nt, synthetic construct
  source 1..243: mol_type = other RNA
atggccgtggacctgctgcccgcccaggagagcatgaccttcagggacgtggccgtgttcttcagccaggacgagtggctgcacctggacagcgcccagagggccctgtacagggaggtgatgctggagaactacagcaccctggtgagcctgggcatccccttcagcatgcccaaggtgatccaccagctgcagcagggccaggacccctgcatggtggagggcgaggtgcccagcgacatc

SEQ ID NO: 18932 - RNA, 243 nt, synthetic construct
  source 1..243: mol_type = other RNA
agggagcccgcccaggtgctggtggccgccgagagcctgatcgacaacgaggagggctacgtgaccttcgaggacgtggccgtgtacttcagccaggaggagtggaggctgctggacgaggcccagaggctgctgtacaggaacgtgatgctggagaacttcagcctgatggccagcctgggcctggccagcagcaagacccacgagatcacccagctggagagctgggaggagcccttcgtg

SEQ ID NO: 18933 - RNA, 243 nt, synthetic construct
  source 1..243: mol_type = other RNA
atggccgccgccgccctgagggagcccgcccagggctacgtgaccttcgaggacgtggccgtgtacttcagccaggaggagtggaggctgctggacgaggcccagaggctgctgtacaggaacgtgatgctggagaacttcagcctgatggccagcctgggcctggccagcagcaagacccacgagatcacccagctggagagctgggaggagcccttcgtgcccgcctgggacgtgatgacc

SEQ ID NO: 18934 - RNA, 243 nt, synthetic construct
  source 1..243: mol_type = other RNA
atggccaccgccctgaccgaccccgcccaggtgagcgtgaccttcgacgacgtggccgtgaccttcacccaggaggagtggggccagctggacctggcccagaggaccctgtaccaggaggtgatgctggagaactgcggcctgctggtgagcctgggctgccccgtgcccaggcccgagctgatctaccacctggagcacggccaggagccctggaccaggaaggaggacctgagccagggc

SEQ ID NO: 18935 - RNA, 243 nt, synthetic construct
  source 1..243: mol_type = other RNA
atgaacgtggaggtgctgaaggtgatcagccaggacctggtgaccttcaaggacgtggccatcgacttcagccaggaggagtggcagtggatgaaccccgcccagaagaggctgtacaggagcatgatgctggagaactaccagagcctggtgagcctgggcctgtgcgtgagcaagccctacgtgatcagcctgctggagcagggcagggagccctgggagatgaccagcgagatgaccagg

SEQ ID NO: 18936 - RNA, 243 nt, synthetic construct
  source 1..243: mol_type = other RNA
caggaccccagcgccgagcagctgagcgaggaggtgcccgtggtgttcgaggagctgcccgtggtgttcgaggacgtggccgtgtacttcaccagggaggagtggggcatgctggacaagaggcagaaggagctgtacagggacgtgatgaggatgaactacgagctgctggccagcctgggccccgccgccgccaagcccgacctgatcagcaagctggagaggagggccgccccctggatc

SEQ ID NO: 18937 - RNA, 243 nt, synthetic construct
  source 1..243: mol_type = other RNA
atggacgtggcccaggagcaggtgaccttccaggacgtggccatctacttcagctgggaggagtgggagtgcctggagcccagccagagggccctgtacagggacgtgatgctggacaacttcagcaacgtggccgccctgggcttctgcagccccaggcccgacctggtgagcaggctggagcagtgggaggagccctgggtggaggacagggacaggcccgagctgcaggccgtgcagagg

SEQ ID NO: 18938 - RNA, 243 nt, synthetic construct
  source 1..243: mol_type = other RNA
tgccaggagctggtgaccttcgaggacgtggccgtgtacttcagcctggaggagtgggagaggctggaggccgaccagaggggcctgtaccaggaggtgatgcaggagaactacggcatcctggtgagcctgggctaccccatccccaagcccgacctgatcttcaggctggagcagggcgaggagccctgggtgcccgacagccccaggcccgaggagggcgacatcgtgaccggcgtgtac

SEQ ID NO: 18939 - RNA, 243 nt, synthetic construct
  source 1..243: mol_type = other RNA
agcaaggcccccgtgaccttcggcgacctggccatctacttcagccaggaggagtgggagtggctgagccccaaccagaaggacctgtacgaggacgtgatgctggagaactaccacaacctggtgagcgtgggcctggcctgcaggaggcccaacatcatcgccctgctggagaagggcaaggccccctggatggtggagcccagcaggaagaggaggggccccgagctgggcagcaaggac

SEQ ID NO: 18940 - RNA, 243 nt, synthetic construct
  source 1..243: mol_type = other RNA
taccaggagatggtgaccttcgaggacgtggccgtgcacttcaccaagaccgagtggaccggcctgagccccgcccagagggccctgtacaggagcgtgatgctggagaacttcggcaacctgaccgccctgggctaccccgtgcccaagcccgccctgatcagcctgctggagaggggcgacatggcctggggcctggaggcccaggacgacccccccgccgagaggaccaagaacgtgtgc

SEQ ID NO: 18941 - RNA, 243 nt, synthetic construct
  source 1..243: mol_type = other RNA
taccagatccccgtgagcttcaaggacgtggtggtgggcttcacccaggaggagtggcacaggctgagccccgcccagagggccctgtacagggacgtgatgctggagacctacagcaacctggtgagcgtgggctacgagggcaccaagcccgacgtgatcctgaggctggagcaggaggaggccccctggatcggcgaggccgcctgccccggctgccactgctgggaggacatctggagg

SEQ ID NO: 18942 - RNA, 243 nt, synthetic construct
  source 1..243: mol_type = other RNA
gagcccggcgccgtgagcttcgccgacgtggccgtgtacttctgcagggaggagtggggctgcctgaggcccgcccagagggccctgtacagggacgtgatgagggagacctacggccacctgagcgccctgggcatcggcggcaacaagcccgccctgatcagctgggtggaggaggaggccgagctgtggggccccgccgcccaggaccccgaggtggccaagtgccagacccagaccgac

SEQ ID NO: 18943 - RNA, 243 nt, synthetic construct
  source 1..243: mol_type = other RNA
gagatgggcctgctgaccttcagggacatcgccatcgagttcagcctggaggagtggcagtgcctggactgcgcccagaggaacctgtacagggacgtgatgctggagaactacaggaacctggtgagcctgggcatcgccgtgagcaagcccgacctgatcacctgcctggagcagaacaaggagagccagaacatcaagaggaacgagatggtggccaagcaccccgtgaccaggagccac

SEQ ID NO: 18944 - RNA, 243 nt, synthetic construct
  source 1..243: mol_type = other RNA
agccagggcagcgtgaccttcagggacgtggccatcgacttcagccaggaggagtggaagtggctgcagcccgcccagagggacctgtacaggtgcgtgatgctggagaactacggccacctggtgagcctgggcctgagcatcagcaagcccgacgtggtgagcctgctggagcagggcaaggagccctggctgggcaagagggaggtgaagagggacctgttcagcgtgagcgagagcagc

SEQ ID NO: 18945 - RNA, 243 nt, synthetic construct
  source 1..243: mol_type = other RNA
gcccaggagagcgtgaccttcgaggacgtggccgtgaacttcaccaacagggagtggcagtgcctgacctacgcccagaggcacctgtacaaggacgtgatgctggagaactacggcaacatggtgagcctgggcttccccttccccaagccccccctgatcagccacctggagagggaggtggacccctgcgtgcaggacccccaggacagggagagcctgagctgcagctaccccgtgagc

SEQ ID NO: 18946 - RNA, 243 nt, synthetic construct
  source 1..243: mol_type = other RNA
gtgcaggagcccgtgaccttcaaggacgtggccgtggacttcacccaggaggagtggggccagctggacctggtgcagaggaccctgtacagggacgtgatgctggagacctacggccacctgctgagcgtgggcaaccagatcgccaagcccgaggtgatcagcctgctggagcagggcgaggagccctggagcgtggagcaggcctgcccccagaggacctgccccgagtgggtgaggaac

SEQ ID NO: 18947 - RNA, 243 nt, synthetic construct
  source 1..243: mol_type = other RNA
agccaggccagcgtgagcttcaaggacgtgaccatcgagttcacccaggaggagtggcagcagatggcccccgtgcagaagaacctgtacagggacgtgatgctggagaactacagcaacctggtgagcgtgggctactgctgcttcaagcccgaggtgatcttcaagctggagcagggcgaggagccctggttcagcgaggaggagttcagcaaccagagccaccccaaggactacaggggc

SEQ ID NO: 18948 - RNA, 243 nt, synthetic construct
  source 1..243: mol_type = other RNA
agccaggagctgctgaccttcaaggacgtgagcgtggacttcacccaggaggagtggggccagctggcccccgcccacaggaacctgtacagggaggtgatgctggagaactacggcaacctggtgagcgtgggctgccagctgagcaagcccggcgtgatcagccagctggagaagggcgaggagccctggctgatggagagggacatcagcggcgtgcccagcagcgacctgaagagcaag

SEQ ID NO: 18949 - RNA, 243 nt, synthetic construct
  source 1..243: mol_type = other RNA
caccaggaggtggtgaccttcgaggacgtggccgtgtacttcaccaggaccgagtgggccggcctgagccccgcccagagggccctgtacaggagcgtgatgctggagatctacaggagcctgaccagcctgggctaccccgtgcccaagcccgccctgatcagcctgctggagaggggcgacctgcccgtgggcctggagacccaggacaacccccccgcccagggcaccagggacatctac

SEQ ID NO: 18950 - RNA, 243 nt, synthetic construct
  source 1..243: mol_type = other RNA
agcaaggcccccatcaccttcggcgacctggccatctacttcagccaggaggagtgggagtggctgagccccatccagaaggacctgtacgaggacgtgatgctggagaactacaggaacctggtgagcctgggcctgagcttcaggaggcccaacgtgatcaccctgctggagaagggcaaggccccctggatggtggagcccgtgaggaggaggagggcccccgacagcggcagcaagtgc

SEQ ID NO: 18951 - RNA, 243 nt, synthetic construct
  source 1..243: mol_type = other RNA
gccctgaggagcgtgatgttcagcgacgtgagcatcgacttcagccccgaggagtgggagtacctggacctggagcagaaggacctgtacagggacgtgatgctggagaactacagcaacctggtgagcctgggctgcttcatcagcaagcccgacgtgatcagcagcctggagcagggcaaggagccctggaaggtggtgaggaagggcaggaggcagtaccccgacctggagaccaagtac

SEQ ID NO: 18952 - RNA, 243 nt, synthetic construct
  source 1..243: mol_type = other RNA
agctggggccccctgagcttcatggacgtgttcgtggacttcacctgggaggagtggcagctgctggaccccgcccagaagtgcctgtacaggagcgtgatgctggagaactacagcaacctggtgagcctgggctaccagcacaccaagcccgacatcatcttcaagctggagcagggcgaggagctgtgcatggtgcaggcccaggtgcccaaccagacctgccccaacaccgtgtggaag

SEQ ID NO: 18953 - RNA, 243 nt, synthetic construct
  source 1..243: mol_type = other RNA
agcctgggccccctgagcttcaaggacgtggccgtggccttcagccaggaggagtggcagcagctggaccccgaggagaggaccacctacagggacgtgatgctggagacctacagcaacctggtgagcgtgggctacgacatcatcaagcccgacgtgatcatcaagctggagcagggcgaggagccctggatcgtggagggcgccttcagcccccagagctaccccgacgagatcaggcac

SEQ ID NO: 18954 - RNA, 243 nt, synthetic construct
  source 1..243: mol_type = other RNA
aggcaggccttcctggccttcggcgacgtgaccgtggacttcacccagaaggagtggaggctgctgagccccgcccagagggccctgtacagggaggtgaccctggagaactacagccacctggtgagcctgggcatcctgcacagcaagcccgagctgatcaggaggctggagcagggcgaggtgccctggggcgaggagaggaggaggaggcccggcccctgcgccggcatctacgccgag

SEQ ID NO: 18955 - RNA, 243 nt, synthetic construct
  source 1..243: mol_type = other RNA
caggccgaggtgaccttcgaggacgtggccgtgttcctgagccaggaggagtggggcctgctgggccccgcccagaagggcctgtacagggaggtgatgctggagacctacaggaacctggtgagcctgggcgccggcctggccggccccaagcccgaggtgatcgcccagctggagcagggcgacgagctgtgggtgctggacatgcacggcgccgagcagcccagcgtggacggcagcgcc

SEQ ID NO: 18956 - RNA, 243 nt, synthetic construct
  source 1..243: mol_type = other RNA
agccagggcagggtgaccttcgaggacgtgaccgtgaacttcacccagggcgagtggcagaggctgaaccccgagcagaggaacctgtacagggacgtgatgctggagaactacagcaacctggtgagcgtgggccagggcgagaccaccaagcccgacgtgatcctgaggctggagcagggcaaggagccctggctggaggaggaggaggtgctgggcagcggcagggccgagaagaacggc

SEQ ID NO: 18957 - RNA, 243 nt, synthetic construct
  source 1..243: mol_type = other RNA
agcaaggcccccgtgaccttcggcgacctggccatctacttcagccaggaggagtgggagtggctgagccccatgcagaaggacctgtacgaggacgtgatgctggagaactaccacaacctggtgagcgtgggcctggcctgcaggaggcccaacatcatcgccctgctggagaagggcaaggccccctgggtgatcgagcccagcaggaggaggtggggccccgagagcggcagcaagtac

SEQ ID NO: 18958 - RNA, 243 nt, synthetic construct
  source 1..243: mol_type = other RNA
aggcaggagcccgtgaccttcgaggacgtggccgtgtacttcacccagaacgagtgggccagcctggacagcgtgcagagggccctgtacagggaggtgatgctggagaactacgccaacgtggccagcctggccttccccttcaccacccccgtgctggtgagccagctggagcagggcgagctgccctggggcctggacccctgggagcccatgggcagggaggccctgaggggcatctgc

SEQ ID NO: 18959 - RNA, 243 nt, synthetic construct
  source 1..243: mol_type = other RNA
agcctgggcagcgagctgttcagggacgtggccatcgtgttcagccaggaggagtggcagtggctggcccccgcccagagggacctgtacagggacgtgatgctggagacctacagcaacctggtgagcctgggcctggccgtgagcaagcccgacgtgatcagcttcctggagcagggcaaggagccctggatggtggagagggtggtgagcggcggcctgtgccccgtgctggagagcagg

SEQ ID NO: 18960 - RNA, 243 nt, synthetic construct
  source 1..243: mol_type = other RNA
atggtgaccttcgaggacgtggccgtgcacttcaccaagaccgagtggaccggcctgagccccgcccagagggccctgtacaggagcgtgatgctggagaacttcggcaacctgaccgccctgggctaccccgtgcccaagcccgccctgatcagcctgctggagggcggcgacatggcctggggcctggaggcccaggacgacccccccgccgagaccaccaagaacgtgaggaaggacgtg

SEQ ID NO: 18961 - RNA, 243 nt, synthetic construct
  source 1..243: mol_type = other RNA
aagcccggcaccgtgagcttcgccgacgtggccgtgtacttcagccccgaggagtggggctgcctgaggcccgcccagagggccctgtacagggacgtgatgcaggagacctacggccacctgggcgccctgggcttccccggccccaagcccgccctgatcagctggatggagcaggagagcgaggcctggagccccgccgcccaggaccccgagaagggcgagaggctgggcggcgccagg

SEQ ID NO: 18962 - RNA, 243 nt, synthetic construct
  source 1..243: mol_type = other RNA
caggccgaggtgaccttcgaggacgtggccgtgtacctgagcagggaggagtggggcaggctgggccccgcccagaggggcctgtacagggacgtgatgctggagacctacggcaacctggtgagcctgggcgtgggccccgccggccccaagcccggcgtgatcagccagctggagaggggcgacgagccctgggtgctggacgtgcagggcaccagcggcaaggagcacctgagggtgaac

SEQ ID NO: 18963 - RNA, 243 nt, synthetic construct
  source 1..243: mol_type = other RNA
gccaggggcaagagcaagagcaaggcccccatcaccttcggcgacctggccatctacttcagccaggaggagtgggagtggctgagccccatccagaaggacctgtacgaggacgtgatgctggagaactacaggaacctggtgagcctgggcctgagcttcaggaggcccaacgtgatcaccctgctggagaagggcaaggccccctggatggtggagcccgtgaggaggaggagggccccc

SEQ ID NO: 18964 - RNA, 243 nt, synthetic construct
  source 1..243: mol_type = other RNA
agccagggcctggtgaccttcggcgacgtggccgtggacttcagccaggaggagtgggagtggctgaaccccatccagaggaacctgtacaggaaggtgatgctggagaactacaggaacctggcctggctgggcctgtgcgtgagcaagcccgacgtgatcagcagcctggagcagggcaaggagccctggaccgtgaagaggaagatgaccagggcctggtgccccgacctgaaggccgtg

SEQ ID NO: 18965 - RNA, 243 nt, synthetic construct
  source 1..243: mol_type = other RNA
agcaaggcccccatcaccttcggcgacctggccatctacttcagccaggaggagtgggagtggctgagccccatccagaaggacctgtacgaggacgtgatgctggagaactacaggaacctggtgagcctgggcctgagcttcaggaggcccaacgtgatcaccctgctggagaagggcaaggccccctggatggtggagcccgtgaggaggaggagggcccccgagctggtgaccgtggcc

SEQ ID NO: 18966 - RNA, 243 nt, synthetic construct
  source 1..243: mol_type = other RNA
gtgcaggagcccgtgaccttcaaggacgtggccgtggacttcacccaggaggagtggggccagctggacctggtgcagaggaccctgtacagggacgtgatgctggagacctacggccacctgctgagcgtgggcaaccagatcgccaagcccgaggtgatcagcctgctggagcagggcgaggagccctggagcctggagcagacctgcccccagagggcctgccccgagtggatgaggaac

SEQ ID NO: 18967 - RNA, 243 nt, synthetic construct
  source 1..243: mol_type = other RNA
aagcccgagctggtgagcttcgccgacgtggccgtgtacttcagcccccaggagtggggctgcctgaggcccgcccagagggccctgtacagggaggtgatgagggagacctacggcctgctgggcgccctgggcttccccggccccaagcccgccctgatcagctggatggagcaggagagcgaggcctggagccccgccgcccaggaccccgaggagggcgagagcctgggcggcgccccc

SEQ ID NO: 18968 - RNA, 243 nt, synthetic construct
  source 1..243: mol_type = other RNA
cccagcggcctggtgaccttcgaggaggtggccgtgtacttcaccagggaggagggcgccctgctggaccccacccagagggccctgtacagggacgtgatgcaggagaactacgagaccgtggtgctgctgggcttccccgtgagcaagcccgacgtgatcagccagctggagaggggcgaggagccctgggtgcccgacctgcagggcagcgagaaggaggtgctgcccagggccgcctgc

SEQ ID NO: 18969 - RNA, 243 nt, synthetic construct
  source 1..243: mol_type = other RNA
atgagcgtgaccttcgaggacgtggccatgtacttcagccccgccgagtgggtgctgctgggcgaggagcagaagcagctgtacaggcacgtgatgtgggagaactaccagaccctggtgagcctgggcatccagatcagcaagcccgtggtgatcagcagcatcgagaggggcgaggagctgtgggcccagagccccaccgaggacgaggacgaggacatcctgagcggcaccagccccggc

SEQ ID NO: 18970 - RNA, 243 nt, synthetic construct
  source 1..243: mol_type = other RNA
ctggtgcccgtgaccttcgaggacgtggccgtgtacttcagcagggaggagtggggcctgctggacgacatgcagaggaccttctacagggacgtgatgaaggagaactaccagaccgtggtgagcctgcccggcagcagcatccccaagcccgacgtgatcagccagatggagaggggcgaggagccctgggtgcccgacctgcagaagctgggcccccaccagacccccgagaaccccctg

SEQ ID NO: 18971 - RNA, 243 nt, synthetic construct
  source 1..243: mol_type = other RNA
atgcccgtgaccttcgaggaggtggccgtgtacttcaccgagggccagggcgccctgctggaccccgcccagagggccctgtacagggacgtgatgcaggagatctacgagatggtgatcagcctgggcttcctgctgcccaagcccgacgtgatcatccagctggagaggggcgaggagccctgggtgcccgacctgcagggcagcgccgagagggagatgagcaggggcacctgcgccggc

SEQ ID NO: 18972 - RNA, 243 nt, synthetic construct
  source 1..243: mol_type = other RNA
ggcctggtgagcttcgacgaggtgagcgtgcacttcaccaacgaggagtgggccctgctggaccccggccagagggccctgtacgaggaggtgatggaggagatcagggagatgatgaccagcgtgggcgacgtgagcgagttcctgaccgagggcgagcagagcgagcccagcagggagggcgccgaggagcagaaggagcagaggaagcagagggtgcaggtgggcacctacaggaaggag

SEQ ID NO: 18973 - RNA, 243 nt, synthetic construct
  source 1..243: mol_type = other RNA
ggcagcgtgagcttcgacgaggtgagcgtgaggttcagcaacgaggagtgggccctgctggaccccggccagagggccctgtacgaggaggtgatggaggagatcagggagatgatgaccagcgtgggcgacgtgagcgagttcctgaccgagggcgagcagagcgagctgagcagggagggcgccgaggagcagaaggagcagaggaagcagagggtgcaggtgggcacctacaggaacgag

SEQ ID NO: 18974 - RNA, 243 nt, synthetic construct
  source 1..243: mol_type = other RNA
ttccagatccccgtgaccttcgaggaggtggccgtgtacttcacccagggccagggcgccctgctggaccccgcccagagggccctgtacagggacgtgatgcaggagaactacgagaccgtgaccagcctgggcttccccatccccaagcccgacctgatcgccaggctggagaggggcgaggagccctgggtgctggacctgcaggccagcgacgagagcgtgagcctgaggggcacctgc

SEQ ID NO: 18975 - RNA, 243 nt, synthetic construct
  source 1..243: mol_type = other RNA
gtggtgctgctggaggccttcgaggacgtggccgtgtacttcacccagaaggagtgggccctgctggacgacggcgacaaggccctgtacagggaccagatgctgaggaactaccaggccctgatcagcctgggctacaggggccccacccccgccctgatcaacaggatccagaggggcgagatggagctgtgggtgtgcgacaaggactacggcgagaagagcagcctggagggcctgttc

SEQ ID NO: 18976 - RNA, 243 nt, synthetic construct
  source 1..243: mol_type = other RNA
ttcagcctggaggacgtgagcgtgagcttcagccccgccgagtgggccctgctggaccccgcccagagggccctgtggagggaggtgatgagggagaacgccgagaacgtggccttcctggccaggagcatcggcgagaccctggtggaggccaacaacgaccccgtgagcgagggcaggctggagaggagcagcggcggcgccgaggagcagatcagcttccccaacggcctggccaagagg

SEQ ID NO: 18977 - RNA, 243 nt, synthetic construct
  source 1..243: mol_type = other RNA
gcccaggtggccttcgaggacgtggccgtgtacttcaccgaggagcagtgggccctgctggaccacagccagagggccctgtacagggacgtgatgcaggagaactacgagaccgtggccagcctgggcctgcccatccccggccccgacagcatcagcaggctgcagcagagggaggagagcaggatcgaggcccagcccgtgctggagggcaacgacgtgagcagcgacgacgacctgggc

SEQ ID NO: 18978 - RNA, 243 nt, synthetic construct
  source 1..243: mol_type = other RNA
gcccagaggcccgtgaccttcgaggacgtggccgtgtacttcagcgaggcccagggcaccctgctggaccccgaccagaaggccctgtacagggaggtgatgatggagaactacgagaacgtggccagcctgggcagcctgacccccaagcccgagctgatcatcaggctggagaggggcgaggagccctgggtgagcgaccccggcgacgcccccgtgagcggcgacttcaggaagagccac

SEQ ID NO: 18979 - RNA, 243 nt, synthetic construct
  source 1..243: mol_type = other RNA
gcccaggccggcgtgagcttcgaggaggtggccgtgcacttcagccccggcgagtggagcctgctgcagcccgcccagagggccctgtacaaggaggtgatgctggagaacttcggccacgtggccagcctgggcccccccggcgccacccccgacctgatcgcctggctgcaggagggcctgttcctgctgggcggcgacgaggaggccggcagcgccggcgacgcctggaggagcgccacc

SEQ ID NO: 18980 - RNA, 243 nt, synthetic construct
  source 1..243: mol_type = other RNA
ttccagggcctggtgaccttcgaggaggtggccgtgtacttcaccagggaggagggcgccctgctggaccccacccagagggccctgtacagggacgtgatgcaggagaactacgagaccgtggtgctgctgggcaaggagagcttcagcaagcccgacgtgatcagccagctggagaggggcgaggagccctgggtgcccgacctgcagggcagcgagaaggagaggcccgaggagaacttc

SEQ ID NO: 18981 - RNA, 243 nt, synthetic construct
  source 1..243: mol_type = other RNA
gcccagggccccgtgaccttcgaggaggtggccgtgtacttcaccagggaggagggcgccctgctggaccccacccagagggccctgtacagggacgtgatgcaggagaactacgagaccgtggtgctgctgggcttccccgtgagcaagcccgacgtgatcagccagctggagcagggcgaggagccctggatccccgacctgcagggcagcgagaaggaggtgctgcccagggccgcctgc

SEQ ID NO: 18982 - RNA, 243 nt, synthetic construct
  source 1..243: mol_type = other RNA
ttccagatgcccgtgaccttcgaggaggtggccgtgtacttcacccagggccagggcgccctgctggaccccgcccagagggccctgtacagggacgtgatgcaggacaactacgagatggtgaccagcctgggcttccccatccccaagcccgagctgatcgccaggctggagaggggcgaggagccctgggtgcccgacctgcaggcctgcgaggagaggaggctgcccaggtgcaccagg

SEQ ID NO: 18983 - RNA, 243 nt, synthetic construct
  source 1..243: mol_type = other RNA
ggcagcgtgagcttcgacgaggtgagcgtgaggttcagcaacgaggagtgggccctgctggaccccggccagagggccctgtacgaggaggtgatggaggagatcagggagatgatgaccagcgtgggcgacgtgagcgagttcctgaccgagggcgagcagagcgagcccagcagggagggcgccgaggagcagaaggagcagaggaagcagagggtgcaggtgggcacctacaggaaggag

SEQ ID NO: 18984 - RNA, 243 nt, synthetic construct
  source 1..243: mol_type = other RNA
cagatgctggtgaccttcgaggacatcgccgtgagcttcagcaaggaggagtgggagtacctggacgagggccagaaggagctgtacagggaggtgatgaaggagaactaccagaccctgatcagcctgggcaccggcttccccaccgtgatccccgagatcatcagccacatcgagcagggcgacgagcccggcagcgaggagagggagaacggcaagagcagctgcagcggcgagagcggc

SEQ ID NO: 18985 - RNA, 243 nt, synthetic construct
  source 1..243: mol_type = other RNA
ttccagaccctgctggccttcgaggacgtggccgtgttcttcagcgaggaggagtgggagctgctggacgagctgcagaaggaggtgtacaagaacaccatgagggagaactacgagaccctgctgagcctgggcctgaccaacatgaagcccgagatcatcgccaagatcgacgccggcgaggcccccagcgtgcagaacgccagctacctggagaagaggggcaagaagagcgccgccggc

SEQ ID NO: 18986 - RNA, 243 nt, synthetic construct
  source 1..243: mol_type = other RNA
caggtgcccgtgaccttcgaggacatcaccatctacttcagccaggaggagtgggagggcctgcaggagtggcagaaggagctgtacaaggacgtgatgaaggagaactacgagatcctgatcagcctgggcgccagcagccccatcctgacccccgacgtgatcagccacatcgagaggggcgaggagccctacatcagggacgagcccaggagcgaggagagggagagcggcaagagcagc

SEQ ID NO: 18987 - RNA, 243 nt, synthetic construct
  source 1..243: mol_type = other RNA
gcccagggccccgtgaccttcgaggacgtggccgtgtacttcagcgccgaggagtggcaggagctggccggctggcagagggagctgtacagggacgtgatgatggacacctacgagctggtggccagcctgggccccgccggcctgaagcccgaggtggtgagcaagctggagaggggcgaggagccccaccagcccgccaggagcagggagagccccagggcccccctgcccgtgctgctg

SEQ ID NO: 18988 - RNA, 243 nt, synthetic construct
  source 1..243: mol_type = other RNA
gagcccgtgagcttcgaggaggtggccgtgtacttcagcagggaggagtgggccctgctggaccccgcccagagggccctgtactgggacgtgatgctggagacctacgagtgcgtggccagcctggcccccctgcccggccccaagcccatggtgatcagcctgctggaggagggcgaggagccctggatccccgacgtgggcagccccgaggccgtggccggcgacgtgagccccggcgag

SEQ ID NO: 18989 - RNA, 243 nt, synthetic construct
  source 1..243: mol_type = other RNA
agcaagctgcccgaggccttcgaggacgtggccgtgtacttcaccaggaaggagtgggagctgctggaggccggcgacaagggcctgtaccaggaccagatgctgaggaactaccaggccctggtgagcctgggcctgcagggccccgcccccgacctgatctgcaggatgcagctgggcgagatggagctgtgggtgtgcgacgacgaggaggccggcgagagcagcctgagcgaggacttc

SEQ ID NO: 18990 - RNA, 243 nt, synthetic construct
  source 1..243: mol_type = other RNA
gaccagctgcaggaggccttcgaggacgtggccctgtacttcacccagaacgagtgggagctgctgggcgacggcgacaaggtgctgtacagggaccagatgctgaggaactaccaggccctggtgagcctgggctaccagggccccgcccccgacctgatcagcaggatccagaggcaggaggtggagctgtgggtgtgcgaggaggagaaccccggcgagagcgtgtggaccgagggcctg

SEQ ID NO: 18991 - RNA, 243 nt, synthetic construct
  source 1..243: mol_type = other RNA
tgccaggagcccgtgagcttcgcccaggtggccgtgtacttcagcagggaggagtgggccctgctggaccccgcccagagggccctgtacagggacgtgatgctggagacctaccagtgcgtggccagcctggcccccctgcccgcccacaagcccatggtgatcagcctgctggagggcggcgaggacccctggatccccgacgtgaggagccccgaggccgtgcccggcgacctgagcccc

SEQ ID NO: 18992 - RNA, 243 nt, synthetic construct
  source 1..243: mol_type = other RNA
tgccaggagcccgtgagcttcgcccaggtggccgtgtacttcagcagggaggagtgggccctgctggaccccgcccagagggccctgtacagggacgtgatgctggagacctaccagtgcgtggccagcctggcccccctgcccgcccccaagcccatgctgatcagcctgctggagggcggcgaggacccctgggtgcccgacgtgtgcagccccgaggccgtgcccggcgacctgagcccc

SEQ ID NO: 18993 - RNA, 243 nt, synthetic construct
  source 1..243: mol_type = other RNA
caggtgcccgtgatcttcgaggacgtggccgtgtacttctgggaggaggagtgggagatgctggaggagtggcagaaggagctgtacaaggagaccatgaaggagaactacaagaccctggtgagcctgggcatggagctgcccaccgagaagcccgacctgatcgtgaggatcgagagggaggagaacccctgcgtgaaggcccagtgggacagcagggacaagaccaggtggaggaacagc

SEQ ID NO: 18994 - RNA, 243 nt, synthetic construct
  source 1..243: mol_type = other RNA
atgagggtgaccttcgaggacatcgccgtgagcttcagccaggaggagtgggagtacctggacgaggagcagaaggagctgtacagggaggtgatgaaggagaactaccagaccctgatcagcctgggcgccggcagcctgaccttcacccccgagatcatcagccacatcgagaggggcgaggagccctacagcagggacgagcccggcagcggcgagagggagcccggcaagagcaggtgc

SEQ ID NO: 18995 - RNA, 243 nt, synthetic construct
  source 1..243: mol_type = other RNA
gacagggtgaagttcaccttcagcgacgtggccgtgtacttcagcgaggaggagtggcagctgctggaggagcagcagaaggagctgtacaggaacgtgatgaaggagaactacaccaccctgaccagcctgggctacaccaccgtgaagcccgacgtgatcagcaagatcgagcagggcaagcagcccagcgtgagcagccccagcggcagcaagggcaggagggccgtgggcaggcccacc

SEQ ID NO: 18996 - RNA, 243 nt, synthetic construct
  source 1..243: mol_type = other RNA
caggtgcccgtgaccttcgaggacatcgccatctacttctgccaggaggagtgggaggtgctggaggagtggcagaaggacctgtacaaggacgtgatgaaggagaactaccaggccctgatcagcctgggcaccggcagcctgatcgtgagccccgacatcatcagcaggatcgagaggggcgaggacccctacatcagggacgagaggggcagcaagaagagggagaccgagaacagcagc

SEQ ID NO: 18997 - RNA, 243 nt, synthetic construct
  source 1..243: mol_type = other RNA
gtgcaggtgcccgtgaccttcgaggacgtggccgtgtacttcagcgaggacgagtggggcatgctggccggctggcagaaggagctgtacaaggagaccatgaaggagaactacgagaccctgaccctgctgggctgcctgagcgagaagcccagcctgatcagcaagatcgagagggaggaggacccctgcgtgagggaccagcaggaccccagggacaggaggaagctgaggagcagctgg

SEQ ID NO: 18998 - RNA, 243 nt, synthetic construct
  source 1..243: mol_type = other RNA
acccagatgcaggtgaagttcgacgacatcgccgtgagcttcagccaggaggagtggaagtacctggacgaggagcagaaggagctgtacagggaggtgatgaaggagaactaccagatcctgatcagcctgggcaccggcagcagcaccacccccaagatcatcagccacatcgagaggggcgaggagccctacatcagggacgagcccgtgctggtggagaggaagaccggcaagagcagc

SEQ ID NO: 18999 - RNA, 243 nt, synthetic construct
  source 1..243: mol_type = other RNA
atgcccgtgaccttcgaggaggtggccgtgtacttcacccagggccagggcgccctgctggaccccgcccagagggccctgtacagggacgtgatgcaggagaactacgagaccgtgaccagcctgggcttccccatccccaagcccgagctgatcgccaggctggagaggggcgaggagccctgggtgcccgacctgcaggcctgcaaggagaggaggctgcccaggtgcaccaggaccggc

SEQ ID NO: 19000 - RNA, 243 nt, synthetic construct
  source 1..243: mol_type = other RNA
gcccagatgcaggtgaccttcgaggacatcgccgtgttcttctgccacgaggagtggaagtacctggacgacggccagaaggagctgtacaaggaggtgatgaaggagaactacgagaccctgatcagcctgggcttcctgtgcgagaagcccagcctgatcagcaagatcgagagggaggaggacccctgcgtgagggaccagcaggacttcagggagaggaggaggaggctgaagagcttc

SEQ ID NO: 19001 - RNA, 243 nt, synthetic construct
  source 1..243: mol_type = other RNA
caggtgcccgtgaccttcgaggacatcgccgtgagcttcagccaggaggagtggaagtacctggacgagggccagaagaacctgtactgggaggtgatgaaggagaactacgagaccctgatcagcctggccgacagcgaggtggagcaggaggacaagagggccaagaacagggaggagtgccccatgctgtggggcctgatccccaggcagagcaggaagaacagcgagaaggtgagctgg

SEQ ID NO: 19002 - RNA, 243 nt, synthetic construct
  source 1..243: mol_type = other RNA
atgcccgtgaccttcgaggacgtggccgtgtacttcacccagggccagggcgccctgctggaccccacccagagggccctgtacagggacgtgatgcaggagaactacgagaccgtgaccagcctgggcaagagcgtgaagggcttccccctggccaagcccgacctgatcaccaggctggagaggggcgaggagccctgggtgagcgacctgcaggccaccggcgacgagaggatgagcgag

SEQ ID NO: 19003 - RNA, 243 nt, synthetic construct
  source 1..243: mol_type = other RNA
ctggagggcctggtgaccttcgaggaggtggccgtgtacttcaccgagagcgagtggagcctgctggaccccgcccagagggccctgtacagggacgtgatggaggagaactacgagaacgtgaccagcctgggcttccccgtgagcaagcccgacgtgatcagctggctggagaggggcgaggacccctgggtgcccgacctgcaggaccccgagaagagggagaccctgagggaggcctgc

SEQ ID NO: 19004 - RNA, 243 nt, synthetic construct
  source 1..243: mol_type = other RNA
aagcacggccccgtgaccttcgaggaggtggccgtgtacttcaccagggaggagtgggccctgctggaccccacccagagggccctgtacagggacgtgatgcaggagaactacgagatggtggtgctgctgggcttcctgaacagcaagcccgacgtgatcagccagctggagcagggcgaggagccctgcatcgtggacctgcagggcagcgagaaggaggtgctgcccagggccgcctgc

SEQ ID NO: 19005 - RNA, 243 nt, synthetic construct
  source 1..243: mol_type = other RNA
ttccagatgcccgtgaccttcgaggaggtggccgtgtacttcacccagggccagggcgccctgctggaccccgcccagagggccctgtacagggacgtgatgcaggagaactacaagatggtgaccagcctgggcttccccctgcccaagcccgagctgatcagcaggctggagcagggcgaggagccctgggtgcccgacctgcaggcctgcgaggagagggagagcctgagcggcaaccac

SEQ ID NO: 19006 - RNA, 243 nt, synthetic construct
  source 1..243: mol_type = other RNA
agcaagctgagcgaggccttcgaggacgtggccgtgtacttcacctggaaggagtgggccctgctggaggccgccgacaagatgctgtacagggaccagatgctgaagaactaccaggccctgttcagcctgggctacaggggccccacccccgacctgatctgcaggatccagaggggcgagatggagctgtgggtgagcgacctggaggaggccggcgagagcagcctgagcgaggacagc

SEQ ID NO: 19007 - RNA, 243 nt, synthetic construct
  source 1..243: mol_type = other RNA
atggagcccagggacgccttcgaggacgtggccgtgtacttcaccagggaggagtgggccctgctggacgacggcgacaagggcctgtacagggaccagatgctgaggaactaccaggccctggtgagcctgggctacaggggccccacccccgacctgatctgctgcatccagaggggcaaggtggagctgtgggtgagggacggcgaggaccacggcgagatcagcggcagcgaggacctg

SEQ ID NO: 19008 - RNA, 243 nt, synthetic construct
  source 1..243: mol_type = other RNA
ctgcaggagcccgtgagcttcgccgaggtggccgtgtacttcagcagggaggagtgggccctgctggaccccgcccagagggccctgtacagggacgtgatgctggagacctaccagtgcgtggcctggctggcccccctgcccgcccccaagcccggcctgatcagcctgctggagggcggcgaggacccctggatccccgacgtgaggagccccgaggccgtgcccggcgacctgagcccc

SEQ ID NO: 19009 - RNA, 243 nt, synthetic construct
  source 1..243: mol_type = other RNA
gccagggagcccgtgagcttcgtggaggtggccgtgtacttcagcagggaggagtgggccctgctggaccccgcccagagggccctgtacagggacgtgatgctggagacctacgagagcgtggccagcctgggccccttccccgcccccaagcccgtggtgatcagcctgctggagggcggcgacgacccctggatccccgacgtgcacagccccgaggccgtgagcggcgacttcagcccc

SEQ ID NO: 19010 - RNA, 243 nt, synthetic construct
  source 1..243: mol_type = other RNA
gtgcccgtgaccttcgaggacgtggccgtgaggttcagcgccgaggagtgggagatcctggagggctggcagaaggagctgcacaaggaggtgatggaggagaactaccagctgctgatcagcctgggccagcccgtgcccaccctggccctgctggccctgaccgccgagagggaggccgccggcggccagatcaggagcgtgagcggcgagagggagctggccagcaagggcggcagcagc

SEQ ID NO: 19011 - RNA, 243 nt, synthetic construct
  source 1..243: mol_type = other RNA
ggcaagatgagcgtgaccttcgaggacgtggccctgtacttcagccccgaggagtgggccaagctgagcggctgccagaggcagctgtaccaggaggtgatgctggagaactaccagatggtggccagcctgggctgggccaacgtgaagcccgagatcatctgcaagatggagagggaggagaccccctgcgtgcccgacgtgcccggcaagcagcagaggcaccagagccccgtgcccgtg

SEQ ID NO: 19012 - RNA, 243 nt, synthetic construct
  source 1..243: mol_type = other RNA
gtggccttcgaggacgtggccgtgtacttcaccgccgaggagtgggacctgctgggccccaaccagaagagcctgtacagcgaggtgatgatggagaactacgagaacgtgagctacctggccgacaactggaagaagaccatcgccttcgcccacagccagaaggacttcatccacaagctgcaccagaggacccacaaggaggacgagcaccacaccagggccgagccctgcgagagcacc

SEQ ID NO: 19013 - RNA, 243 nt, synthetic construct
  source 1..243: mol_type = other RNA
ctgcaggagcccgtgagcttcgccgaggtggccgtgtgcttcagcagggaggagtgggccctgctggaccccgcccagagggtgctgtacagggacgtgatgctggagacctaccagtgcgtggccagcctggccagcctgctgacccccaagcccgtgctgatcagcctgctggagggcggcgaggagccctggatccccgacgtgaggagccccgaggccacccccggcgacctgagcccc

SEQ ID NO: 19014 - RNA, 243 nt, synthetic construct
  source 1..243: mol_type = other RNA
ggcaagatgagcgtgaccttcgaggacgtggccctgtacttcagccccgaggagtgggccaagctgagcggctgccagaggcagctgtacagggaggtgatgctggagaactaccagatggtggccagcctgggctgggccaccgtgaagcccgagatcatctgcaagatggagagggaggagaccccctgcgtgctggacccccccggcgagcagcagatgcaccagagccccgtgcccgcc

SEQ ID NO: 19015 - RNA, 243 nt, synthetic construct
  source 1..243: mol_type = other RNA
ccccaggacagcgtgaccttcgaggaggtggccgtgagcttcagcagggaggagtgggccctgctgaccgactggcagaagaacctgtacaaggacgtgatgagggacaactacgagatgctgaacagcctggacctggccgcccacaagcccgacatcatcctgaggatcgagaggggccaggagccctgcgtgggcaggctgcagaggagcaaggccagggagaggcccaaccacgtgttc

SEQ ID NO: 19016 - RNA, 243 nt, synthetic construct
  source 1..243: mol_type = other RNA
aagaccgcccccgtgaccttcgacgacgtggccgtgtacttcagcgccgaggagtgggaggagctggccgagtggcagaaggagctgtacaaggacgtgatgagggacaactacgaggccctgatcagcctgggccacgccgccgccaagcccgacatcatccagctgctggagcacggcgaggagccctgcgtgaagggccacaaggacagcggcaacggcaaggccttcaacttcatcagc

SEQ ID NO: 19017 - RNA, 243 nt, synthetic construct
  source 1..243: mol_type = other RNA
tggcaggagcccgtgaccttcgaggacgtggccgtgtacctgagccacgccgagtgggacgccatggcccccgagcagagggagctgtactgcagcgtgatgctggacaactaccagctgctggccagcctgggctaccccggccccaagcccgacatcgtgtacaggctggagaggggcgaggagccctggggctgcgccccccagagccccctgagctgggacggccccaggagccccagc

SEQ ID NO: 19018 - RNA, 243 nt, synthetic construct
  source 1..243: mol_type = other RNA
ggcaagatgagcgtgaccttcgaggacgtggccctgtacttcagccccgaggagtgggccaagctgagcggctgccagaggcagctgtacagggaggtgatgctggagaactaccagatggtggccagcctgggctgggccaacatcaagcccgagatcatctgcaagatggagagggaggagaccctgtgcgtgcccgccccccccagggagtggcagagggaccagagccccgtgcccgcc

SEQ ID NO: 19019 - RNA, 243 nt, synthetic construct
  source 1..243: mol_type = other RNA
ttccagatgcccgtgaccttcgaggaggtggccgtgtacttcacccagggccagggcgccctgctggaccccgcccagagggccctgtacagggacgtgatgcaggagaactacgagatggtgaccagcctgggcttccccatccccaagcccgagctgatcgccaggctggagaggggcgaggagccctgggtgcccgacctgcaggcctgcaaggagaggaggctgcccaggtgcaccagg

SEQ ID NO: 19020 - RNA, 243 nt, synthetic construct
  source 1..243: mol_type = other RNA
caggacgccgtgaccttcaaggacgtggccatctacttcagccccgaggagtgggtgaggctgagcgccggccagagggagctgtaccaggaggtgatgctggacaactacgagctggtgaccagcctggacagggagtgcaagctgctgtacaagatggaccccgaggaggagccctgcgagggcgtgccctgcaggggcgtggacagcggcgccctggacaacagcagcaccagcgcctgc

SEQ ID NO: 19021 - RNA, 243 nt, synthetic construct
  source 1..243: mol_type = other RNA
tgccaggagcccgtgagcttcgccgaggtggccgtgtacttcagcagggaggagtgggccctgctggaccccgcccagagggccctgtacagggacgtgatgctggagacctaccagtgcgtggcctggctggccagcctgcccgcccccaagcccggcctgatcagcctgctggagggcggcgaggacccctggatccccggcgtgaggagccccgaggccatgcccggcgacctgagcccc

SEQ ID NO: 19022 - RNA, 243 nt, synthetic construct
  source 1..243: mol_type = other RNA
cccagcgtgcccgtgaccttcagggacgtgttcgtgcagttcagcagggacgagtgggccctgctggacgacgagcagaaggagctgcaccagagcgtgatgcagagcaactacgaggtgctgatgagcctgtactgcgacctggccaagcccgaggtgctgctgcagatggagaggggcgagccctgcctgcccgccgagcccgacctgcagggcgccgccgtgagcctgaaccccgccgcc

SEQ ID NO: 19023 - RNA, 243 nt, synthetic construct
  source 1..243: mol_type = other RNA
ctgcaggagcccgtgagcttcgaggaggtggccgtgtacttcagcagggaggagtgggccctgctggaccccgcccagagggccctgtacagggacgtgatgctggagacctacgagtgcgtggccagcctggcccccctgcccgcccccaagcccatggtgatcagcctgctggaggagggcgaggagccctgggtgcccgacgtgggcagccccgaggccgtggccggcgacgtgagcccc

SEQ ID NO: 19024 - RNA, 243 nt, synthetic construct
  source 1..243: mol_type = other RNA
gagcccgtgagcttcgaggaggtggccgtgtacttcagcagggaggagtgggccctgctggaccccgcccagagggccctgtacaggcacgtgatgctggagacctacgagtgcgtggccagcctggcccccctgcccgcccccaagcccatggtgatcagcctgctggaggagggcgaggagccctggatccccgacgagggcagcaggcaggccgtggccggcgacgtgagccccggcgag

SEQ ID NO: 19025 - RNA, 243 nt, synthetic construct
  source 1..243: mol_type = other RNA
gcccagaggtgggaggccttcgaggacgtggccctgtacttcacccagaaggagtgggagctgctgagggacggcgacaaggtgctgtaccaggagcagatgctgaggaactaccaggccctggtgagcctgggctaccagggccccacccccgacctgatctgcaggatccagaggggcgacatggagctgtgggtgtgcgacgacgaggaccccaaggagagcatgtggagcgagggcctg

SEQ ID NO: 19026 - RNA, 243 nt, synthetic construct
  source 1..243: mol_type = other RNA
gcccccggcagcgtgaccttcagggacgtggccatcgacttcagccaggaggagtggaagtggctgcagcccgcccagagggacctgtacaggtgcgtgatgctggagaactacggccacctggtgagcctgggcctgtgcatcagcaagcccgacgtggtgagcctgctggagcagggcaaggagccctggctgggcaagggcggcgtgaacagggacctgttcagcgtgagcgacggcaag

SEQ ID NO: 19027 - RNA, 243 nt, synthetic construct
  source 1..243: mol_type = other RNA
aggcccagggccctgaagttcgccgacgtggccgtgtacttcagcctggaggagtggggctgcctgaggcccgcccagaggaccctgtacaggaacgtgatgagggagacctacggccacctgggcgccctgggctgcgccggccccaagcccgccctgatcagctggctggagaggaacaccgacgactgggagcccgccgccctggacccccaggagtaccccaggggcgtgaccgtgcag

SEQ ID NO: 19028 - RNA, 243 nt, synthetic construct
  source 1..243: mol_type = other RNA
aagcccgagctggtgagcttcgaggacgtggccgtgtacttcagcccccacgagtggggctgcctgaggcccgcccagagggccctgtacagggaggtgatgagggagacctacggcctgctgggcgccctgggcttccccggccccaagcccgccctgatcagctggatggagcaggagagcgaggcctggagccccgccgcccaggaccccgccgagggcgagagcctgggcggcgccctg

SEQ ID NO: 19029 - RNA, 243 nt, synthetic construct
  source 1..243: mol_type = other RNA
gagcagggcctggtgagcttcgaggacgtggccgtggacttcacctggcaggagtggcaggagctggacgccgcccagaggaccctgtacagggacgtgatgctggagaactacagcagcctggtgagcctgggccactgcgtgaccaagcccgagctgatcttcaggctggagcacggcttcggcccctggagcatcggcgagaccagcctgtggaacctgcccggcgtgctggaggtgccc

SEQ ID NO: 19030 - RNA, 243 nt, synthetic construct
  source 1..243: mol_type = other RNA
aaggtgaagcagttcagcttccagagcctgctgaccttcaaggacctggccatcaacttcagcaaggaggagtgggagtacctgaacaccagccagaaggacctgtacaaggacgtgatgctggagaactacagcaacctggtgagcgtgggcctgagcgagagcaagcccgagctggtgacctgcctggagcagaacaaggagccctggatggtgcacatcgtggaggccgagggcctggag

SEQ ID NO: 19031 - RNA, 243 nt, synthetic construct
  source 1..243: mol_type = other RNA
atggagagcgtgagcttcgaggacgtggccgtgaagttcacccaggaggagtgggccgtgctggaccccagccagaagaagctgtacaaggacgtgatgcaggagaccctgaagaacctggccagcatcggcaacaagagcggcaagcagaaggtgatcaacgagtacggcaagctgtggaggaagctgagcagccacctggccggcaagttcagcgactacaacgagaaccaccagtgcgcc

SEQ ID NO: 19032 - RNA, 243 nt, synthetic construct
  source 1..243: mol_type = other RNA
agccaggtgagcgtgaccttcgaggacgtggccgtgctgttcaccagggacgagtggaagaagctggaccacagccagaggagcctgtacagggaggtgatgctggagaactacagcaacctggccagcctgggcttccccttcgccaagcccgagatgatcagcgtgctgcagcagggcgaggagccctggaaggtggagaagaggagcctgggcttcagcctgggctgcaacagcagcctg

SEQ ID NO: 19033 - RNA, 243 nt, synthetic construct
  source 1..243: mol_type = other RNA
caggccagcgtgaccttcgaggacgtggccgtgaggttcacccaggaggagtgggccctgctggaccccagccagaagatcctgtacggcgacgtgatgcaggagacctacaggaacctgaccagcgtgggcatcaactgggagtgctgggacctggaggcctacttcaggagcctggagaggaacctgagggtgcagctggtgaagagggactgcgagctgaagaacaacgacccctgcggc

SEQ ID NO: 19034 - RNA, 243 nt, synthetic construct
  source 1..243: mol_type = other RNA
atgctgagcttctgggacgtggccatcgagttcagccccgaggagagggagtgcctggaccccgcccagtggagcctgtacagggacgtgatgctggagaactacagcaacctgctgttcctgggcctggccgtgcccaagccccacctggtgaccttcctggagcagaggcaggagagcagcggcgtgaagaggcaggccgccgccaccgtgcaccccggcaggatccccaacgactacaac

SEQ ID NO: 19035 - RNA, 243 nt, synthetic construct
  source 1..243: mol_type = other RNA
gccaggggcctgatggccttcgaggacgtggccgtgtacttcagccaggaggagtggatgttcctgaacgccgcccagagggccctgtacaggcacgtgatgctggagaacttcgccctggtggacagcatcggccccagcgtgagcaggcccagggtgatcatccagctgcagaggggcgaggagccctgggtgcccaacaggaccatcgccggccccggcaggggcacccacaggaggagc

SEQ ID NO: 19036 - RNA, 243 nt, synthetic construct
  source 1..243: mol_type = other RNA
agccaggtgagcgtgaccttcgaggacgtggccgtgctgttcaccagggacgagtggaagaagctggtgcccagccagaggagcctgtacagggaggtgatgctggagaactacagcaacctggccagcctggccggcttccccttcaccaagcccaaggtgatcagcctgctgcagcagggcgaggacccctggaaggtggaggaggagggccccggcggcttcagcctgggcctgaagtgc

SEQ ID NO: 19037 - RNA, 243 nt, synthetic construct
  source 1..243: mol_type = other RNA
ttccagaacagcctgacctacgacgacgtgcacatcaacttcacctgcgaggagtgggccctgctggacgccagccagaagaggctgtacaaggacgtgatgctggagacctacagcaacctgaccgccatcggctacaagtgggaggaccacaacatcgaggagcactgccagaggttcaggaggaggggcaggcacaagaggagcaggaccgaggagaggccctacgagtgcaagcagtgc

SEQ ID NO: 19038 - RNA, 243 nt, synthetic construct
  source 1..243: mol_type = other RNA
gacgccgtgacctacgaggacgtgcacgtgaacttcacccacgaggagtgggccctgctggaccccagccagaagagcctgtacaaggacgtgatgctggagacctactggaacctgaccagcatcggctacaagtgggaggaccacaacttcgaggagaactgccagagcagcaggaggcacggcaggcacatcaactgccccagcggctacaagccctgcgagcacgaggagtacggcaag

SEQ ID NO: 19039 - RNA, 243 nt, synthetic construct
  source 1..243: mol_type = other RNA
atgaacaccgtgacctacgacgacgtgcacgtgaacttcacctgggaggagtggaccctgctggaccccagccagaagaacctgtacaaggacgtgatgctggagacctacaggaacctgaccgccgtgggctacagctgggaggaccacaacgtggaggagcactgccagagctacaggaggcacagcaggctggagaggagccacaccggcgagaagagcagcgtgcacacccagtgcgtg

SEQ ID NO: 19040 - RNA, 243 nt, synthetic construct
  source 1..243: mol_type = other RNA
agccaggaggccgtgaccttcgaggacgtggccgtgtacttcacccagaaccagtgggccagcctggagcccgcccagaaggccctgtaccaggaggtgatgctggagaactacgccaacatcaccagcctggccgccctgcccttccccaagcccgacctgatcttccagctggagctgggcgaggccccctgggtgcccgacagctggaggcccgtgggcgaggaggccctgggcggcagg

SEQ ID NO: 19041 - RNA, 243 nt, synthetic construct
  source 1..243: mol_type = other RNA
agccagggccccgtgctgttcgaggacgtgagcgtggacttcacccagaaggagtggcagctgctggaccccgcccagaggaggctgtacagggacgtgatgctggagaactacaggcacctggagagcctgggccactgcgtgaccaagcccgagctgatcaggaggctggagcagggcgaggagccctggatcctgaagagggaggtgcccagccacagccacgccgaggtgcagagggcc

SEQ ID NO: 19042 - RNA, 243 nt, synthetic construct
  source 1..243: mol_type = other RNA
agcaaggcccccgtgaccttcggcgacctggccatctacttcagccaggaggagtgggagtggctgagccccatccagaaggacctgtacgaggacgtgatgctggagaactacaccaacctggtgagcctgggcctgagcagcaggaggcccaacgtgatcgccctgctggagaagggcaaggccccctggatggtggagccccccaggaggaggcagggccccgacagcaggagcaagtgc

SEQ ID NO: 19043 - RNA, 243 nt, synthetic construct
  source 1..243: mol_type = other RNA
tgccaggccctggtgaccttcgaggacgtggccgtgaccttcaccgacgacgagtggaagaggctggtgcccgtgcagagggccctgtacaaggccgtgatgctggagaactacgagagcatcatcagcctgggcctgcccgtgcccaggcccgacctgatcctgcagttcaagaggaggggcgagccctggatgaggggcttccacggcagcgaggagaaggcctggcccgagagcgtgagc

SEQ ID NO: 19044 - RNA, 243 nt, synthetic construct
  source 1..243: mol_type = other RNA
gagcaggacgccgtgacctacgaggacgtgcacgtgaacttcacccacgaggagtgggccctgctggaccccagccagaagagcctgtacaaggacgtgatgatggagacctactggaacctgacctgcatcggctacaagtgggaggaccacaacatcgaggagcactgccagagctgcaggaggaacggcagcaggtgcgtgatctgccacagcggccacaacccctgcgagcacaagggc

SEQ ID NO: 19045 - RNA, 243 nt, synthetic construct
  source 1..243: mol_type = other RNA
agcaaggcccccgtgaccttcggcgacctggccatctacttcagccaggaggagtgggagtggctgagccccatccagaaggacctgtacgaggacgtgatgctggagaactaccagaacctggtgctgctgggcctggcctgcaggaggcccaacatcatcaccctgctggagaagggcaaggccccctgggtggtggagcccagcaggaggaggaggggccccgagagcggcagcaagtgc

SEQ ID NO: 19046 - RNA, 243 nt, synthetic construct
  source 1..243: mol_type = other RNA
caggagatccccgtgagcttcaaggacgtggtggtgggcttcacccaggaggagtggcactggctgaaccccgtgcagagggccctgtacagggacgtgatgctggagacctacagcaacctggtgagcgtgggctacgagggcaccaagcccgacgtgatcctgaggctggagcaggaggaggccccctgggtgtgcgaggccccctgccccggctgctgctgctgggaggacatctggcag

SEQ ID NO: 19047 - RNA, 243 nt, synthetic construct
  source 1..243: mol_type = other RNA
cagtgcctgctgaccttcaaggacgtgttcctggacttcagcagcgaggagtgggagtgcctgaacttcgcccagaggaccctgtacatggacgtgatgctggagaactacaacaacctgctgttcgtggagaaccactgcatctgcggcaactacgagaaggagaaggtgctggagcaggacacccagcacatcgtgaacgagcacggccacaacaggaagaagagcagcaagtgcaacgag

SEQ ID NO: 19048 - RNA, 243 nt, synthetic construct
  source 1..243: mol_type = other RNA
agcaaggccagcgtgaccttcggcgacctggccatctacttcagcagggaggagtgggagtggctgagccccatccagaaggacctgtacgaggacgtgatgctggagaactaccagaccctggtgagcctgggcctggtgtgcaggaggcccaacatcatcaccctgctggagaagggcaaggccccctggatggtggagcccagcaggaggaggaggggccccgagagcggcagcaagagg

SEQ ID NO: 19049 - RNA, 243 nt, synthetic construct
  source 1..243: mol_type = other RNA
atggacgccgtgacctacgaggacgtgcaggtgagcttcaccagggaggagtggaccctgctggaccccagccagaagagcctgtacaaggacgtgatggtggagacctacaggaacctgaccgccatcggctacaagtgggaggaccagaacatcaagaagcaccaccagtgcagcaggaggcacggcaggcacgagaggagcaacagcgccgagaaggactacgagtgcgagcagtgcggc

SEQ ID NO: 19050 - RNA, 243 nt, synthetic construct
  source 1..243: mol_type = other RNA
cacaagaagagcatggtgttcagcgacgtgagcctggacttcagccaggaggagtgggagtgcctgggccccgcccagaaggacctgtacagggacgtgatgctggagaactacagccacctgctgagcgtggccggcctgcacatccccaagccccaggtgatcagcctgctggagcagggcaaggagccctggatgatcggcaaggagctgaccaggggcctgtgcagcgccctggagagc

SEQ ID NO: 19051 - RNA, 243 nt, synthetic construct
  source 1..243: mol_type = other RNA
atgaacgccgtgacctacgacgacgtgcacgtggacttcacctgggacgagtgggccctgctggaccccagccagaagaacctgtacaagaacgtgatgctggagacctacaggaacctgaccgccatcggctacaagtgggaggagcacaacatcaacgagaagttccagaggagcaggaggaacaggaggcacgagaggagccacaccggcgagaagagctacgagtgcaaccagtgcggc

SEQ ID NO: 19052 - RNA, 243 nt, synthetic construct
  source 1..243: mol_type = other RNA
gacgccgtgacctaccaggacctgcacatcaccttcacccaggaggagtgggccctgctggacagcagccagaggaacctgtacaaggacgtgatgctggagacctacatgaacctgaacgccatcggctacaagtgggaggacaacgacatcgagcagcactgcaggagcccccagaggcacggcaggcacgagaggagccccaccagggagaagcccagcgcctacatgcagtgcgacaag

SEQ ID NO: 19053 - RNA, 243 nt, synthetic construct
  source 1..243: mol_type = other RNA
gcccacagcatggtgatgttcagggacgtgaccgtggacttcagccaggaggagtgggagtgcctgagcagctacgagagggacctgtacagggacgtgatgctggagaactacagccacctggtgagcctggccggctgcagcatcagcaagcccgacgtgatcaccctgctggagcagggcaaggagccctggatgatcgtgagggccgagaagaggaggtggagcagggacctggagagc

SEQ ID NO: 19054 - RNA, 243 nt, synthetic construct
  source 1..243: mol_type = other RNA
agggagaggctggtgagcttcgaggacgtgaccgtggacttcagccaggaggagtggaggaggctggacagcgtgcagaggcacctgtaccaggacgtgatgctggagatctacagccacctgctggccgtgggctaccccgtgcccagccccggcgccatcttcaggatcaagaagaggaaggaggccaggaccggcgaggccaagctgccccacccctgctggtgccaggaggtggagagc

SEQ ID NO: 19055 - RNA, 243 nt, synthetic construct
  source 1..243: mol_type = other RNA
tgcaacagctggatcagccccagcgacgtggccatcaacttcagcaaggaggagtgggagtgcctgcaccccagccagaaggacctgtacagggacgtgatgctggagaactacagcaacctggtgagcgtgggcctgagcgagagcaagcccgagctggtgacctgcctggaggagaacaaggagccctggatggtgaacatcgacgaggccgagggcctgggccagggcgtgttctgctac

SEQ ID NO: 19056 - RNA, 243 nt, synthetic construct
  source 1..243: mol_type = other RNA
gcccccctgcccctgaccttcgaggacgtggccatctacttcagcgagcaggagtggcagcacctggagacctggcagaaggagctgtacaagcaggtgatgaggaccaactacgagaccctgatcagcctggacaacggcctgcccaagcccgagctgatcagctggatggagctgggcagggagaacttcggcagctggggcgagggccagaaggtggacaggggcatcaggtgcagcgtg

SEQ ID NO: 19057 - RNA, 243 nt, synthetic construct
  source 1..243: mol_type = other RNA
aagcccggcaccgtgagcttcgccgacgtggccgtgtacttcagccccgaggagtggaggtacctgaggcccgcccagagggccctgtacagggaggtgatgagggagacctacggcctgctgacctacctggacgtgggctgcgccaagcccgccctgatcagctgggtggaggaggagagcgaggtgtggggccccggcgcccaggaccccgaggtggccatgtgcaggaccgaggtgcac

SEQ ID NO: 19058 - RNA, 243 nt, synthetic construct
  source 1..243: mol_type = other RNA
gacaaggccctgatggccttccacgacgtggccgtggccttcagccagatggagtgggagctgctgagccccgcccagaggatcctgtacagggaggtgatgctggagaactacagccacctggtgagcctgggcatcgccttcagcaagcccaagctgatcacccagctggagcagggcgccgagccctggagggacggcagcggctgcttcctggacctgtgccccgccgagcccaggacc

SEQ ID NO: 19059 - RNA, 243 nt, synthetic construct
  source 1..243: mol_type = other RNA
gtgtgcggcagcgtgaccttcaaggacgtggccgtggacttcagccaggaggagtgggcctgcctggacgccacccagaaggtgctgtacagggacatgatgctggagacctacagcaacctggtggccgtggtgggcaggtgcatcagcaagcccgacctgatcgtgctgctggagcaggagaaggagccctggatggccgtgaaggaggagaccgacaggcccagccccgacctggagagc

SEQ ID NO: 19060 - RNA, 243 nt, synthetic construct
  source 1..243: mol_type = other RNA
atggccttcgaggacgtggccgtgtacttcagccaggaggagtgggtgttcctggacgccgcccagagggccctgtacaggcacgtgatgctggagaacttcgccctggtggacagcatcggcctgagcatcagcaggcccagggtgatcatccagctgcagaggggcgaggagccctgggtgcccaacaggaccaacaccggccccggcaggggcaccaggaggaggcccagcctgggcagc

SEQ ID NO: 19061 - RNA, 243 nt, synthetic construct
  source 1..243: mol_type = other RNA
atggagagcgtgagcttcgaggacgtggccgtgaacttcacccccgaggagtgggccctgctgaacagcagccagaagaggctgcacagggacgtgatgcaggagaacttcaggaacctggccgccatcgccaagaaccaggaggaccccaccctggaggacgactacgagtacctgaggaagatcctgcccttcgccgtgcagaccggctacaggctgtgcgagaaccaggactacgccgag

SEQ ID NO: 19062 - RNA, 243 nt, synthetic construct
  source 1..243: mol_type = other RNA
atggacgccgtgacctacgaggacgtgcacgtgaacttcagccaggaggagtgggccctgctggaccccagccagaagagcctgtacaaggacgtgatgctggagacctactggaacctgacctgcatcggctacaagtgggaggaccacaacatcgaggaccagcaccagagcagcggcaggcacggcaggtgcatcaactgccccagcgcctacggcaagaagcagtgcaccaacctgttc

SEQ ID NO: 19063 - RNA, 243 nt, synthetic construct
  source 1..243: mol_type = other RNA
ctgctgcacggctgctgcagcctggagacccacagcatcagggacaagaacgccgtgacctacggcgacgtgcacgtgaacttcacccaggaggagtgggccctgctggaccccagccagaagaagctgtacaaggacgtgatgctggagacctacaggaacctgaacgccatcggcttcaactgggacgacaagaacaccgaggagcactgccccagcaccaggaggtggaggaggtacccc

SEQ ID NO: 19064 - RNA, 243 nt, synthetic construct
  source 1..243: mol_type = other RNA
cccgccgacagggacgccgtgacctacgacgacgtgcacatcggcttcacccaggaggagtgggtgctgctgaaccccagccagaagagcctgtacaaggacgtgatgctggacacctacaggaacctgaccgccatcggctacaggtggcaggaccacaacatcgaggagcactgcgagaacagcaggaggcacaggaggaagttcagctgcaccaccaagccctacgagagcctgcagaac

SEQ ID NO: 19065 - RNA, 243 nt, synthetic construct
  source 1..243: mol_type = other RNA
atgggcagcgtgagcttcgaggacatcagcctggacttcacctgggacgagtggcaggacctggacagcgcccagaggaccctgtacagggacgtgatgctggagaactacagcagcctgatgttcctgggccactgcaccaccaagcccgagctgatcttcaagctggagcacggcttcggcccctggagcctggccgaggccagcatccagagcctgcccggcgtgcacaagatgaccgtg

SEQ ID NO: 19066 - RNA, 243 nt, synthetic construct
  source 1..243: mol_type = other RNA
agccagggcctggtgaccttcggcgacgtggccgtggtgttcagccaggaggagtgggagtggctgagcagcgagcagaggagcctgtactggagggtgatgctggacaactacaggaacctggccagcctgggcctgtgcgccagcaagcccgacatgatcgccctgctggagcagggcaaggacccctgcgtgctgaagaggaagaccgccaggggcctgaggcccgacctggaggccgtg

SEQ ID NO: 19067 - RNA, 243 nt, synthetic construct
  source 1..243: mol_type = other RNA
ttccaggagctggtgagcttcaacgacgtgaccgtgggcttcacccaggaggagtggcagcacctggaccccagccagaggagcctgtacagggaggtgatgctggagaactacagccacctggtgagcgtgggctactgcgtgaccaagcccgaggtgatcttcaggctggagcagggcgaggagccctggatcagcgaggccgagttccccagccagagcttccccgagctgtggaaggcc

SEQ ID NO: 19068 - RNA, 243 nt, synthetic construct
  source 1..243: mol_type = other RNA
gtgtgcggcagcgtgaccttcaaggacgtggccgtggacttcagccaggaggagtgggcctgcctggacgccacccagaaggtgctgtacagggacatgatgctggagacctacagcaacctggtggccgtggtgggccactgcatcagcaagcccgacctgatcgtgctgctggagcaggagaaggagccctggatgaccgtgaaggaggagaccgacaggcccagccccgacctggaggcc

SEQ ID NO: 19069 - RNA, 243 nt, synthetic construct
  source 1..243: mol_type = other RNA
agcggcagccaggacgccgtgacctacgaggacgtgcacgtgaacttcacccccgaggagtgggccctgctggacagcagccagaagagcctgtacaaggaggtgatgctggagacctacaggaacctgaccagcatcggctacaagtgggaggacctgaacatcgaggagcactgccagagcagcaggaggctgaagaggtacatcatcggccacagcaggtacaagccctgcgacagggag

SEQ ID NO: 19070 - RNA, 243 nt, synthetic construct
  source 1..243: mol_type = other RNA
ctgagggacctggtgaccttcgaggacgtggccgtggacttcacccaggaggagtgggccctgctggacgccagccagaggagcctgtacagggaggtgatgctggagaactgcaggaacctggccagcctgggctgccacgtggacaagcccagcctgatcagccagctggagcaggaggaccaggccatgaccgaggagaggggcaacctgcccggcacctgccccgacctggagaccgtg

SEQ ID NO: 19071 - RNA, 243 nt, synthetic construct
  source 1..243: mol_type = other RNA
aggcccagggccctgaagttcgccgacgtggccgtgtacttcagccccgaggagtggggctgcctgaggcccgcccagaggctgctgtacagggaggtgatgagggagacctacggcctgctgggcgccctgggctgcgccggccccacccccgccctgatcagctggctggagaggaacaccgacgactgggagcccgccgccctggacccccaggagtacaggaggtgggccaccttccag

SEQ ID NO: 19072 - RNA, 243 nt, synthetic construct
  source 1..243: mol_type = other RNA
gccagggtgagcgtgatgttcagcgacgtgagcatcgccttcagcagggaggagtgggagtacctggacctgagccagagggacctgtacaaggacgtgatgatggagaactacaggaacgtggccagcctgggctacttcatcagcaagcccgacgtgatcagcctgctggagcagggcaaggagccctggaaggtggtgaggaggaggaggaggaaccccgacctggagaccaaggacgag

SEQ ID NO: 19073 - RNA, 243 nt, synthetic construct
  source 1..243: mol_type = other RNA
ttcaaggagctggtggtgttcagggacgtggccgtggagttctgcagggaggagtgggagtgcctggaccccaggcagaggagcctgtacagggacgtgatgctggagacctacggcaacttcgtgagcctgggcctggccatcagcaagcccagcgtgatcagcctgctggagcagggcaaggagccctggatggtggagcaggccggctggtaccccgacctgctgagcgtgaacgagacc

SEQ ID NO: 19074 - RNA, 243 nt, synthetic construct
  source 1..243: mol_type = other RNA
accctgggcctgctgagcttcaacgacgtgagcctggagttcagctgggaggagtggcagctgctggacagcgcccagaggtacctgtacagggaggtgatcctggagaactacagcaacctgctgagcgtgggctaccacggcaccaagcccgacctgatcttcaggctggagcagggcgaggagccctggatcctgaacgccaagatgagcacccagaactgccccgaggtgtgggaggac

SEQ ID NO: 19075 - RNA, 243 nt, synthetic construct
  source 1..243: mol_type = other RNA
atggccttcgaggacgtggccgtgtacttcagccaggaggagtgggtgttcctggacgccgcccagagggccctgtacaggcacgtgatgctggagaacttcgccctggtggacagcatcggcctgagcatcagcaggcccagggtgatcatccagctgcagaggggcgaggagccctgggtgagcaacaggaccaacaccggccccggcaggggcaccaggaggaggcccagcctgggcagc

SEQ ID NO: 19076 - RNA, 243 nt, synthetic construct
  source 1..243: mol_type = other RNA
ctgatcaacgccgtgacctacaacgacgtgcacatcaacttcacccaggaggagtgggccctgctggaccccagccagaagagcctgtacaaggacgtgatgctggagacctacaggaacctgaccgccatcggctacagctgcgaggaccacaacatcgaggagcactgccagagcagcaccaggcacaggaggtacgagaggaggcacagcagggagaagcccagcgagtacagccagtgc

SEQ ID NO: 19077 - RNA, 243 nt, synthetic construct
  source 1..243: mol_type = other RNA
agcgagaccggcaacgccgtgacctacgacgacgtgcacatcagcttcaccagcaaggagtgggccctgctggaccccagccagaagagcctgtacaaggacgtgatgctggagatctacagccacctgaccgccatcggctacaagtgggaggcccacgacagcgaggaccacggccagaggttcaggaggcagaggaggcacaagaggagccacaccgaggtgaagacctacaagtgcagc

SEQ ID NO: 19078 - RNA, 243 nt, synthetic construct
  source 1..243: mol_type = other RNA
gacagcgtgaccttcgaggacgtggccatcagcttcaccgtggaggagtgggccctgctggaccccagccagaagaagctgcacagggacgtgatggaggagaccttcaggaacctggccgccatcggcaggacccaggacgaccagcacatcgacaacgaccacaggtacagcaggaggaaccagaggaacgaggtggtggagaggctgctggagaggaacaagagcagcgagtgcaaggag

SEQ ID NO: 19079 - RNA, 243 nt, synthetic construct
  source 1..243: mol_type = other RNA
ggcaaccagttcagcttccagagcctgctgaccttcaaggacgtggccatcaacttcagcaaggaggagtgggagtgcctgcacaccagccagaggaacctgtacagggacgtgatgctggagaactacagcaacctggtgagcgtgggcctgagcgagagcaagcccgagctggtgacctgcctggagcagaacaaggagccctggatggtgaacatcgacgaggccgagggcctgggccag

SEQ ID NO: 19080 - RNA, 243 nt, synthetic construct
  source 1..243: mol_type = other RNA
atgaacggcatgacctacgacgacgtgcacgtgaacttcaccggcgaggagtgggccctgctgagccccagccagaagaggctgtacaaggacgtgatgctggagacctacaggaacctgaccgccatcggctacagctgggaggacaggaacatcgaggagcacttccagaggagcaggaggcacggcaggcacgagaggagccacaccggcgagaaccccagcgtgtacacccagtgcaac

SEQ ID NO: 19081 - RNA, 243 nt, synthetic construct
  source 1..243: mol_type = other RNA
atgggcgccgtgacctacgacgacgtgcacatcaacttcacccaggaggagtgggccctgctgaaccccagccagaagaggctgtacaaggacgtgatgcacgacacctacagcaacctgaccgccaccggctacagcctggaggaccactacatcgaggagcactgccagagcagcaggaggtgcaggaggcacctgcagaggcacaagaaggtgcacatcggcgagaagccctacgagagc

SEQ ID NO: 19082 - RNA, 243 nt, synthetic construct
  source 1..243: mol_type = other RNA
cccaaggtgcccgtgagcttcgaggacgtggccatgtacttcaccaagaccgagtggaagctgctggacctgaagcagaggatcctgtacaagcaggtgatgctggagaactacggccacctggtgagcctgggcttcgccttcagcaagcccaggctggtgagccagctggagaggggcgagggcccctgggtggccgacagcctgaggggccaggccgaggccgagagccacgccggcgag

SEQ ID NO: 19083 - RNA, 240 nt, synthetic construct
  source 1..240: mol_type = other RNA
atggtgctggtgagcttcgaggacgtggccgtggacttcacctgggaggagtggcaggccctggacgccgcccagaggaccctgtacagggacgtgatgctggagacctacagcagcctggtgagcctgggccactgcatggccaagcccgagctgatcttcaacctggagcagggcctgggccccaggagcaccgccggcgccagcgtgtggaacctgagcggcaggaccgaggacagc

SEQ ID NO: 19084 - RNA, 243 nt, synthetic construct
  source 1..243: mol_type = other RNA
gacctggtgacctacgacgacgtgcacgtgaacttcacccaggaggagtgggccctgctggaccccagccagaagaacctgtacaaggacgtgatgctggagacctacaggaacctgagcgccatcggctacatctgggaggtgcacaccagcgaggaccacttccagaccagcaggagccacggcaggcacgagaggagctgcaccgccgtgcagcccagcgagttcatccagtgcggcaag

SEQ ID NO: 19085 - RNA, 243 nt, synthetic construct
  source 1..243: mol_type = other RNA
ttccaggagctggtggtgttcagggacgtggccgtggagttctgcaaggacgagtgggagtgcctgggccccgaccagaggagcctgtacagggacgtgatgctggagacctacagcaacttcgtgagcctgggcctggccgtgagcaagcccagcgtgatcagcctgctggagcagggcaaggagccctggatggtggagcaggccggctggtaccccgacctgctgagcgtgaacgagacc

SEQ ID NO: 19086 - RNA, 243 nt, synthetic construct
  source 1..243: mol_type = other RNA
ttccagaacagcctgaccttcgacgacgtggccgtggacttcacccaggaggagtgggtgctgatggaccagacccagagggacctgtacagggaggtgatgctggagaactaccagaacctgttcagcgccggctgcgagatcaccaagcccagcctgatcagctggctggaggaggacctgcagatcggccagagggaggacttccaggagtgggagatgcaggacaccctgagggagcag

SEQ ID NO: 19087 - RNA, 243 nt, synthetic construct
  source 1..243: mol_type = other RNA
ctgaacagcgccgtgacctacgacgacgtgaacgtgaacttcaccagggaggagtgggccctgctggacagcagccagaagagcctgtacaaggacgtgatgctggagacctacaggaacctgaccgccatcggctacaactgggagggccacaacatcgaggagcactgccagagcagcaggaggcacgccaggacccacaagaggacccacaccggcgagaagagctacgagtgcgaccag

SEQ ID NO: 19088 - RNA, 243 nt, synthetic construct
  source 1..243: mol_type = other RNA
gccgtgacccagctgaccttcgaggacgtggccgtggacttcacccccgaggagtggaggtgcctgacccccgcccagagggccctgtacagggacgtgatgctggacacctacaggaacctggtgagcgtgggcgtgagcccccccagcatgagcgtgatcctgcccctggagttccaggaggagccctgggtggcccagagccacgtgaccaccctgggcggcctgaacggctgggagggc

SEQ ID NO: 19089 - RNA, 243 nt, synthetic construct
  source 1..243: mol_type = other RNA
atggtgaccttcaaggacgtggccgtggccttcagcgaggaggagctgaggctgctggaccccgcccagaggaagctgtaccaggaggtgatggtggagaacttccagaacctgctgagcgtgggcatcaacaaccagagcgagctgagggccgtgcaggacggcggcagccacgaggccctgagctgctggcagatctggcagagggtgatcgacaacctgaccaggtgccaggacagcatg

SEQ ID NO: 19090 - RNA, 243 nt, synthetic construct
  source 1..243: mol_type = other RNA
aaggagaacgccgtgacctacgacgacatccacatcgacttcaccagggaggagtggaccctgctggaccccagccagaagaacctgtacaaggacgtgatgctggagacctacaggcacctgaccaccatcggctacagctgggaggaccacaacatcgagaagtactgcgagagcagcaggaggcacaagagcaccgtgcagaggcacaagaggaccaacaccaacgagaacccctacgag

SEQ ID NO: 19091 - RNA, 243 nt, synthetic construct
  source 1..243: mol_type = other RNA
gagccctgggccatcaccttcgccgacgtggccgtgtacttcagccccgaggagtggggctgcctgcagcccacccagagggccctgtacagggacgtgatgagggacacctacgtgctgctgagcgccctgggcggcggcggcgccaagcccgccctgatcagctgggtggagagggaggccgagctgtgggaccccgacgcccaggaccccgaggtgcccaagtggcccaccgaggccgac

SEQ ID NO: 19092 - RNA, 243 nt, synthetic construct
  source 1..243: mol_type = other RNA
agccagggcctggtgaccttcggcgacgtggccgtggtgttcagccaggaggagtgggagtggctgagcagcgagcagaggagcctgtactggaaggtgatgctggacaactacaggaacctggccagcctgggcctgtgcgccagcaagcccgacatgatcaccagcctggagcagggcagggacccctggatgatgaagaggaagatgaggaagggccagaggctggacctgaaggccatg

SEQ ID NO: 19093 - RNA, 243 nt, synthetic construct
  source 1..243: mol_type = other RNA
atggccttcgaggacgtggccgtgtacttcagccaggaggagtggatgttcctggacgccgcccagagggccctgtacaggcacgtgatgctggagaacttcgccctggtggacagcatcggcctgagcgtgagcaggcccagggtgatcatccagctgcagaggggcgaggagccctgggtgcccaacaggaccaaccccggccccggcaggagcacctgcaggaggcccagcctgggcagc

SEQ ID NO: 19094 - RNA, 243 nt, synthetic construct
  source 1..243: mol_type = other RNA
gacatgggcctggtgagcttcgaggacgtggccgtggacttcacctggcaggagtggcaggagctggacgccgcccagaggaccctgtacagggacgtgatgctggagaactacaggagcctggtgtggctgggccactgcctggccaagcccgagctgatcagcaagctggaggagggcttcgagccctggggcgtggccgaggccaccgagcagtgcctgccctgcgccgaggaccagacc

SEQ ID NO: 19095 - RNA, 243 nt, synthetic construct
  source 1..243: mol_type = other RNA
cagcagaggcccgtgagcttcaaggacgtggtggtgggcttcacccaggaggagtggaggaggctgaaccccgcccagagggccctgtacagggacgtgatgctggagacctacagcaacctggtgagcgtgggctacgagggcaccaagcccgacgtgatcctgaggctggagcaggaggaggccccctggatctgcgaggccgtgtgccccggctgccactgccaggaggacttcctgagc

SEQ ID NO: 19096 - RNA, 243 nt, synthetic construct
  source 1..243: mol_type = other RNA
gtggaggagcccgtgaccttcaaggacgtggccgtggccttcacccaggaggagtggggccagctggacctggtgcagaggaccctgtacagggacgtgatgctggagacctacggccacctgctgagcgtgggcaaccagatcgccaagcccgaggtgatcagcctgctggagcagggcgaggagccctggagcgtggagcagggctaccccaagagcagctgccccgagtggatgaggaac

SEQ ID NO: 19097 - RNA, 243 nt, synthetic construct
  source 1..243: mol_type = other RNA
atgaacaccgtgacctacgacgacgtgcacatcggcttcacctgggaggagtggaccctgctggaccccagccagaagaacctgtacaaggacgtgatgctggagacctacaggaacctggccatcatcggctacagctgggaggaccacaacatcgaggagcactaccagaacagcaggaggcacgagaggcacgagaggagccagaccggcatgaagaccagcgtgcacacccagtgcagc

SEQ ID NO: 19098 - RNA, 243 nt, synthetic construct
  source 1..243: mol_type = other RNA
ttcaagggccccgtgaccttcaaggacgtgaccgtggagttcaccaaggaggagtggaagctgctgacccccgcccagaggaccctgtacaaggacgtgatgctggagaactacaaccacctggtgagcgtgggctacagggtgagcaagcccaacctggtgttcaagctgaagcagggcaaggagccctgggtgctggaggtggagttccccaggaggaggtgccccgaggagctgtggaac

SEQ ID NO: 19099 - RNA, 243 nt, synthetic construct
  source 1..243: mol_type = other RNA
aagccctgggccgtgaacttcgccgacgtggccgtgtacttcagccccgaggagtggaggtacctgaggcccgcccagagggccctgtacagggaggtgatgagggagacctacggcctgctggcctacctggacgtgggctgcgccaagcccgccctgatctgctgggtggaggaggagagcgaggtgtggggcccctgcgcccaggaccccgaggtggccatgtgcaggaccgaggtgcac

SEQ ID NO: 19100 - RNA, 243 nt, synthetic construct
  source 1..243: mol_type = other RNA
atggaggagatgctgagcttcagggacgtggccatcgacttcagcgccgaggagtgggagtgcctggacctggcccagtggaacctgtacagggacgtgatgctggagaactacagcaacctggtgttcctgggcctggccagctgcaagccctacctggtgaccttcctggagcagaggcagggccccagcgacgtgaagaggcaggccgccgcccccgtgcaccccggcggcaccccctac

SEQ ID NO: 19101 - RNA, 243 nt, synthetic construct
  source 1..243: mol_type = other RNA
aacgccgtgacctacaacgacgtgcacgtggacttcacccaggaggagtgggccctgatggaccccagccagaggaacctgtacaaggacgtgatggtggagacctacatgaacctgaccgccatcggctacaactgggaggacctggaggtggaggagcactgccagaacagcctgaagcacggcaggcacaagaggccccacaccaccgagaagagctgcgagtacatgggctgcggcaag

SEQ ID NO: 19102 - RNA, 243 nt, synthetic construct
  source 1..243: mol_type = other RNA
accgagaacgccgtgacctacgacgacgtgcacgtgggcttcacctgggaggagtgggccctgctggaccccagccagaagaacctgtacaaggacgtgatgctggacacctacaggaacctgaccaccatcggctacagctgggagggccacaacatcgaggagcacttccagagcagcaggaggcacgagaggcacaagaggagcgacaccggcgagaacagcagcgtgtacacccagtgc

SEQ ID NO: 19103 - RNA, 243 nt, synthetic construct
  source 1..243: mol_type = other RNA
gagcccggcgccgtgagcttcgccgacgtggccgtgtacttcagccccgaggagtggggctgcctgaggcccgcccagagggtgctgtacagggacgtgatgagggagacctacggccacctgggcgccctgggcttccccggccccaagcccgccctgatcagctggatggagcaggagagcgaggcctggagcagcgccgcccaggaccccgaggagggcgagagcctgggcggcgccctg

SEQ ID NO: 19104 - RNA, 243 nt, synthetic construct
  source 1..243: mol_type = other RNA
ttccaggagagcgtgaccttcagggacgtggccatcgccttcagccagcaggagtggcagagcctggacagcagccagagggacctgtacagggacgtgatgctggagaactacaggaacctggtgagcctgggccacagcctgagcaagccccacgtgatcaccctgctggagcagtggaaggacccctgggagaccggcaggaaggacaagaggaggaggtgcgccgacctgcagctggag

SEQ ID NO: 19105 - RNA, 243 nt, synthetic construct
  source 1..243: mol_type = other RNA
aagcccggcgccgtgagcttcgccgacgtggccgtgtacttcagccccgaggagtggggctgcctgaggcccgcccagagggccctgtacagggacgtgatgagggagacctacggccacctgggcgccctgggcctgcccggccccaagcccgccctgatcagctggatggagggcgagagcgaggcctggaaccccgccgcccaggaccccgaggagggcgagaacctgggcggcgccctg

SEQ ID NO: 19106 - RNA, 243 nt, synthetic construct
  source 1..243: mol_type = other RNA
gagccctgggccatcaccttcgccgacgtggccgtgtacttcagccccgaggagtggggctgcctgcagcccacccagagggccctgtacagggacgtgatgagggacacctacgtgctgctgagcgccctgggcggcggcggcggcgccaagcccgccctgatcagctgggtggagagggagagcgagctgtgggacagcgacgcccaggaccccgaggtgcccaagtggcccaccgaggcc

SEQ ID NO: 19107 - RNA, 243 nt, synthetic construct
  source 1..243: mol_type = other RNA
gcccaggagagcgtgatgttcagcgacgtgagcatcgacttcagccaggaggagtgggagtgcctgaccgacgaccagaggcacctgtacagggacgtgatgctggagaactacagcaacctggtgagcatgggccacagcatcagcaagcccaacgtgatcagctacctggagcagggcaaggagccctggctggtggacaggggcaggaccaggggccagtggcccgtgctggagagcacc

SEQ ID NO: 19108 - RNA, 243 nt, synthetic construct
  source 1..243: mol_type = other RNA
ctggccagcatcagcttcgaggacctggccgtgaccttcaccgaggaggagtgggagcacctggacctgggccagaggaacctgtaccaggaggtgatgctggagacctaccagctgctggtgagcctgggcgaccaggtgaggctggccccccccacccccggcacccccctgcccgccctgcccgcccagcccaggctgctgggcctgcccagccagcccctggacaggaggggcaccccc

SEQ ID NO: 19109 - RNA, 243 nt, synthetic construct
  source 1..243: mol_type = other RNA
gtgcccgagcccgtgaccttcgaggacgtggccgtggacttcacccaggaggagtggggccagctggacctggtgcagaggaccctgtacagggacgtgatgctggagacctacggccacctgctgagcgtgggcaaccagatcgccaagcccgaggtgatcagcctgctggagcagggcgaggagccctggctggtggagcagacctgccccgagagcagctgccccgagtggatgagggac

SEQ ID NO: 19110 - RNA, 243 nt, synthetic construct
  source 1..243: mol_type = other RNA
atggaggagctgctgagcttccccgacgtggccatcgacttcagcgccgaggagtgcgagtgcctggacctggcccagtggaacctgtacaaggaggtgatgctggagaactacagcaacctggtgttcctgggcctgagcttcagcaagccctacctggtgaccttcctggagcagagcagcgagccctggagcgtgaagaggaagagcgccgccgccagccaccccggcagcaagccccac

SEQ ID NO: 19111 - RNA, 243 nt, synthetic construct
  source 1..243: mol_type = other RNA
gacatgggcctggtgagcttcgaggacgtggccgtggacttcacctggcaggagtggcaggagctggacgccgcccagaggaccctgtacagggacgtgatgctggagaactacagcagcctggtgagcctgggcaactgcctggacaagcccgagctgatcagcaagctggagcagggcctggtgccctggagcggcgccgaggccaccgagcagtaccagcccgacgtgcacaagtggagc

SEQ ID NO: 19112 - RNA, 243 nt, synthetic construct
  source 1..243: mol_type = other RNA
agccagggcctggtgaccttcgaggacgtggccgtgtacttcagcctggaggagtgggagaggctgaacgtggagcagagggccctgtaccaggaggtgatgcagggcaactacggcatcctggtgagcctgggctaccccatccccaagcccgacctgatcttcaggctggagcagggcgaggagccctgggtgcccgacagcccccaccccgaggagggcgacatcgtgaccggcgtgtac

SEQ ID NO: 19113 - RNA, 243 nt, synthetic construct
  source 1..243: mol_type = other RNA
gtgaccttcgaggacgtggccgtgaacttcagcagggaggagtgggccctgctggaccccccccagaggaagctgtacagggacgtgatgtgggagaccctgaggcacctggccgccgtggacgaccagcagagcgaggacgagttcaggaacttccagaagagggtgaggagcgaggaggtggagaaggccagccagtacaccctgtggtaccagcacggcgagatggacagcaggaccccc

SEQ ID NO: 19114 - RNA, 243 nt, synthetic construct
  source 1..243: mol_type = other RNA
cagggcagcgtgaccttcgaggacgtggccgtgcacttcagctgggacgagtggcacctgctggacaaggcccagaggtgcctgtacagggacgtgatggccgagaacctggccctgatcaccagcctgggcctgtggcccggcgtgggcgacgccgaggccagcagcgagcagagcgccagcctgaagggcatgagccaggtgaggaccttcagggagggcctgagcccccagagggcccag

SEQ ID NO: 19115 - RNA, 243 nt, synthetic construct
  source 1..243: mol_type = other RNA
atgggcctggtgagcttcgaggacatcgccgtgtacttcaacctggaggagtggcaggacctggacaccgcccagaggaccctgtacagggacgtgatgctggagacctacagcagcctggtgttcctggacccctgcatcgccaagcccaagctgatcttcaacctggagaggggcttcggcccctggagcctggccgaggccagcagcaggagcctgcccggcgtgcacaacgtgagcacc

SEQ ID NO: 19116 - RNA, 243 nt, synthetic construct
  source 1..243: mol_type = other RNA
ggctgctgcagcctggagacccacagcatcagggacaagaacgccgtgacctacggcgacgtgcacgtgaacttcacccaggaggagtgggccctgctggaccccagccagaagaagctgtacaaggacgtgatgctggagacctacaggaacctgaacgccatcggcttcaactgggacgacaagaacaccgaggagcactgccccagcaccaggaggtggaggaggttctacaggatgcag

SEQ ID NO: 19117 - RNA, 243 nt, synthetic construct
  source 1..243: mol_type = other RNA
agccagggcagcgtgagcttcaaggacgtgaccgtgggcttcacccaggaggagtggcagcacctggaccccagccagaagagcctgtacagggacgtgatgctggagaactacagccacctggtgagcgtgggctactgcgtgaccaagcccgagctgatcttcaggctggagcagggcgaggagccctgggtgctggaggaggagttccccaggcccggcttcctggagttctggaagacc

SEQ ID NO: 19118 - RNA, 243 nt, synthetic construct
  source 1..243: mol_type = other RNA
ctgcaggacagcgtgaccttcaaggacgtggccgtggacttcagccaggaggagtgggagaggctgaaccccgcccagaggagcctgtacaggaccgtggtgctggagaactactggaacctggtgagcgtgggcgcctgcgtgagcaagagccacctgatcagcctgctggagcacggcaaggccccctgggacatgaggggcgaggtgaccgagagcaccagccaggacggcgagagcgtg

SEQ ID NO: 19119 - RNA, 243 nt, synthetic construct
  source 1..243: mol_type = other RNA
gccgtgacccagctgaccttcgaggacgtggccgtggacttcacccaggaggagtggaggtgcctgacccaggcccagaggaccctgtacagggacgtgatgctggacacctacggcaacctggtgagcgtgggcgtgagcccccccagcatgagcgtgatcctgcccctggagttccaggaggacccctgggtggccaagagccacgtgaccacccccggcgagctgaacggctgggagggc

SEQ ID NO: 19120 - RNA, 243 nt, synthetic construct
  source 1..243: mol_type = other RNA
gtgcacggcagcgtgaccttcagggacgtggccatcgacttctgccaggaggagtgggagtgcctgggccccatccagagggacctgtacagggacgtgatgctggagaactacagcaacctgatcgccgtgggcagcaccatcagcaagcccgacgtgatcgccctgctggagcagggcaccgagccctggatgggcgtgaggaaggacaggagcaggtggtaccccggcctgaacagcggc

SEQ ID NO: 19121 - RNA, 243 nt, synthetic construct
  source 1..243: mol_type = other RNA
gccgtgacccagctgaccttcgaggacgtggccgtgtacttcaccagggaggagtggaggtgcctgacccccgcccagaggaccctgtacagggacgtgatgctggacacctacaggaacctggtgagcgtgggcgtgagcccccccagcatgagcgtgatcctgcccctggagttccaggaggagccctgggtggcccagagccacgtgaccaccctgggcggcctgaacggctgggagggc

SEQ ID NO: 19122 - RNA, 243 nt, synthetic construct
  source 1..243: mol_type = other RNA
agccccgtgctggtgagcttcgacgacgtgttcgtgagcttcaccagggaggagtggcaggtgctggacaacgcccagagggccctgtacggcgacgtgatgctggagacctacaggagcctggtgctgctgggccagtgcatcaccaagcccgaggtgatcttcaagctggagcagggcgtggagccctggaccggcggcgagccccacaaccagagcccccccgacgtgcaggaggtggac

SEQ ID NO: 19123 - RNA, 243 nt, synthetic construct
  source 1..243: mol_type = other RNA
aagcccggcgccgtgagcttcgccgacgtggccgtgtacttcagccccgaggagtggggctgcctgaggcccgcccagagggccctgtacagggaggtgatgagggagacctacggcctgctgggcgccctgggcgtgggcggcgccaagcccgccctgatcagctgggtggaggaggaggccgagctgtggggccccggcgcccaggaccccgaggtggccatgtgccagacccaggccgac

SEQ ID NO: 19124 - RNA, 243 nt, synthetic construct
  source 1..243: mol_type = other RNA
cccaaggtgaccgtgagcttcgaggacgtgagcgtgtacttcaccaagaccgagtggaagctgctggacctgaagcagaggaacctgtacaagcaggtgatgctggagaactacagccacctggtgagcgtgggcttcgccttcagcaagcccaacctggtgagccagctggagaggggcgagaagccctggatcagggacgacaggatggagagcgccgccaggagcagggccggcaacagg

SEQ ID NO: 19125 - RNA, 243 nt, synthetic construct
  source 1..243: mol_type = other RNA
atggaggacctgctgagcttcaccgacgtggccatcgacttcagcgccgacgagtgcgagtgcctggacagcgcccagtggaacctgtacaaggaggtgatgctggagaactacagcaacctggtgttcctgggcctggccttcagcaagccccacctggtgaccttcctggagcagagcagcgacccctggagcgtgaagaggaaggccagcgccgccatcagcctgggcagcaagccccac

SEQ ID NO: 19126 - RNA, 243 nt, synthetic construct
  source 1..243: mol_type = other RNA
ctgcaggaggccgtgaccttcaacgacgtggccatcgacttcagccaggaggagtgggagtggctgaacagcgcccagaggagcctgtacaggaccgtggtgctggagaactacaggaacctggtgagcgtgggcgcctgcatcagcaagcccagcctgatcagcctgctggagcacggcaaggagccctgggaggtgaagggccaggtgaccggcagcagggtgcagggcggcgagagcgtg

SEQ ID NO: 19127 - RNA, 243 nt, synthetic construct
  source 1..243: mol_type = other RNA
gcccacggcagcgtgaccttcagggacgtggccatggacttcagccagcaggagtgggagtgcctgaaccccttccagaagaccctgtacagggacgtgatgatggagaactacggcaacctggtgagcctgggccacagcatcagcaagcccgacgtgatcaccctgctggagcagggcaaggagccctggatgatcgtgaagaaggagaccaggaagtggaggaaggacctggagagcagg

SEQ ID NO: 19128 - RNA, 243 nt, synthetic construct
  source 1..243: mol_type = other RNA
ttcaaggagctggtggtgttcagggacgtggccgtggagttctgcaaggaggagtgggagtgcctgggccccgagcagaggagcctgtacagggacgtgatgctggagaactacagcaacttcgtgagcctgggcctggccatcagcaagcccaccatcatcagcctgctggagcagggcaaggagccctggatcgtggagcaggccggctggtaccccgacctgctgagcgagaacgaggcc

SEQ ID NO: 19129 - RNA, 243 nt, synthetic construct
  source 1..243: mol_type = other RNA
ttccaggtgcccgtgaccttcagggacgtggccgtgtacttctgcagggaggagtgggagtgcctgagccccagccagaggaccctgtacaggaacgtgatgctggagaacttcaggaacctgaacgagctgggctgctgcagcaggaggcccggcctgatcaccaggctggagcagtgggacgagccctgggtggacgactgggacaggagcgagttccccgacggccagaagagcttctgc

SEQ ID NO: 19130 - RNA, 243 nt, synthetic construct
  source 1..243: mol_type = other RNA
gagcccggcgccgtgagcttcgccgacgtggccgtgtacttcagcctggaggagtggggctgcctgaggcccagccagagggccctgtacagggacgtgatgagggagacctacctgcacctgagcgccctgggcggcggcggcaccaagcccgccctgatcagctgggtggaggaggaggccgagctgtggcaccccgacgcccaggaccccgaggtggccaagtgccccaccgaggccgac

SEQ ID NO: 19131 - RNA, 243 nt, synthetic construct
  source 1..243: mol_type = other RNA
cagggcagcgtgatgttcagcgacgtgagcatcatcttcagccaggaggagtgggagtacctggacagggagcagaggaacctgtacaggaacgtgatgatggagaactacagcaacctggtgagcctggccggctgcttcatcagcaagcccgacgtgatcaccctgctggagcagggcaaggacccctggaaggtggtgaggaagggcaggaagaggtacagcgacctggagaccagccac

SEQ ID NO: 19132 - RNA, 243 nt, synthetic construct
  source 1..243: mol_type = other RNA
atggacgccgtgaccttcatggacgtgcacgtgaacttcagccaggaggagtgggccctgctgaaccccagccagaagagcctgtacaaggacgtgatgctggagacctactggaacctgacctgcatcggctacgagtgggaggaccacaacagcgaggagtgctgccagagcagcaggaggcacggcaggtacttcaacagcagccagtacagcacctgcaaggccaagggctacggcaag

SEQ ID NO: 19133 - RNA, 243 nt, synthetic construct
  source 1..243: mol_type = other RNA
atggacgccgtgacctacgaggacgtgcacgtgaacttcagcagggaggagtgggtgctgctggaccccagccagaagagcctgtacaaggacgtgatgctggagacctactggaacctgacctgcatcggctacaagtggaaggaccacgacaacgaggagtactgccagaacagcggcaggcacggcaggtgcatcaactgccccagcgcctacggcaagaagcagtgcaccaacctgttc

SEQ ID NO: 19134 - RNA, 243 nt, synthetic construct
  source 1..243: mol_type = other RNA
gagaagcagttcagcttccagagcctgctgaccttcgaggacgtggccatcaacttcagcaagaaggagtgggagtgcctggacaccagccagagggacctgtacaggttcgtgatgctggagaactacagcaacctggtgagcgtgggcctgagcgtgagcaagcccgagctggtgacctgcctggagcagaacaaggagccctggatggtgaacatcgaggagagcgaggtgctggagccc

SEQ ID NO: 19135 - RNA, 243 nt, synthetic construct
  source 1..243: mol_type = other RNA
agcaaggcccccgtgaccttcggcgacctggtgatctacttcagccaggaggagtgggagtggctgagccccatccagaaggacctgtacgaggaggtgatgctggagaactaccacaccctggtgagcctgggcctggtgagcaggaggcccaacatcatcaccctgctggagaagggcaaggccccctggatggtggagcccagcaggaggaggaggggccccgagagcggcagcaagagg

SEQ ID NO: 19136 - RNA, 243 nt, synthetic construct
  source 1..243: mol_type = other RNA
atggacgccgtgacctacgacgacgtgcacatcaacttcaccctggaggagtgggccctgctgaaccccagccagaagagcctgtacaaggacgtgatgctggacacctacaggaacctgaccgccatcggctacagctgggacgaccacaacatcgaggagatctgccagagcagcaggagccacaggaggcacctgcagaggcacgccaagatcaacaccggcgagaagccctacggcagc

SEQ ID NO: 19137 - RNA, 243 nt, synthetic construct
  source 1..243: mol_type = other RNA
accgagggccccctgaccttcagggacgtggccatcgagttcagccaggaggagtggaagttcctggtgcccgcccagagggccctgtacagggacgtgatgctggagacctacaggaacctggtgttcctgggcacctgccccagcgacctgagcgtgctgagctggctggagcagggcagggagctgtggaccgtgaacggccccgaggagatcagcaggcccgccaacgagtgggcctgc

SEQ ID NO: 19138 - RNA, 243 nt, synthetic construct
  source 1..243: mol_type = other RNA
acccagaggagcatcagcttcaaggacctggccgtggacttcaccagggaggagtggcagaggctgggccccgcccagaggctgctgtacagggacgtgatgctggagaactacagcaacctgatcgccgtgggcctgcacgtgagcaagcccgacgtgatcctgaagctggagcagggcaaggagccctgggtggtggagaacagcagcaggcagaaccacgccgaggacgacgagcccctg

SEQ ID NO: 19139 - RNA, 243 nt, synthetic construct
  source 1..243: mol_type = other RNA
atggaggaccccctgagcttcaccgacgtggccatcgacttcagcgccgacgagtgcgagtgcctggacagcgcccagtggaacctgtacaaggaggtgatgctggagaactacagcaacctggtgttcctgggcctggccttcagcaagccccacctggtgaccttcctggagcagagcagcgacccctggagcgtgaagaggaaggccagcgccaccatccccctgggcagcaagccccac

SEQ ID NO: 19140 - RNA, 243 nt, synthetic construct
  source 1..243: mol_type = other RNA
ttccaggacctgctgagcttcaccgacgtggccatcgacttcagcgccgacgagtgcgagtgcctggagcccgcccagtggaacctgtacaaggaggtgatgctggagaactacagcaacctggtgttcctgggcctggccttcagcaagccctacctggtgaccttcctggagcagagcagcgacccctggagcatgaagaggaaggccagcgccgccatccacctgggcctgaagccccac

SEQ ID NO: 19141 - RNA, 243 nt, synthetic construct
  source 1..243: mol_type = other RNA
gacgtggtgacctacgaggacgtgcacgtgaacttcacccaggaggagtgggccctgctggaccccagccagaagaggctgtacaaggtggtgatgctggagacctacaagaacctgagcgccatcggctacatctgggaggaccacaccatcgagcagcacttccagagcagcaggagccacggcaggcacaagaggcacaggaccggcgagcagcccagcgagctgatccagcacggcaag

SEQ ID NO: 19142 - RNA, 243 nt, synthetic construct
  source 1..243: mol_type = other RNA
ctgctgcccgccgccggctgcggcaaggacagcggcacccccgccaccgaggccgtgaccttcgaggacgtggccgtgaacttcagcagggaggagtgggccctgctggaccccccccagaggaagctgtacagggacgtgatgtgggagaccctgaggcacctggccgccgtgggcatgaacagcgacgacaggcagatcgaggacgtgtacaagatctgcaggaagaacctgagcggcgcc

SEQ ID NO: 19143 - RNA, 243 nt, synthetic construct
  source 1..243: mol_type = other RNA
cccatcaccttcgacgacgtggccatcatcttcagccccgaggagtgggagtgcctggacagcgcccagagggacctgtacagggacgtgatggtggagaactgcaggaacctgctgagcgtggaggccagcaggcacggcaccaagggcttcagcagcaagaaggacatgaagaggagcttccaggaggagctgagcaggaggctgagcaagtgcggcgccgacatcttccaccccaggaag

SEQ ID NO: 19144 - RNA, 243 nt, synthetic construct
  source 1..243: mol_type = other RNA
atgaacgccgtgacctacagggacgtgcacgtgaacttcacccaggaggagtgggccctgctggaccccagccagaagaagctgtacaaggacgtgatgctggagacctacaggaacctgaacgccatcggcttcaactgggaggcccagaacatcgaggagcactgccagagcagcaggaggcacaggaggtgcgagaggagccagagcgccgagaagcccagcgagtacacccagagggac

SEQ ID NO: 19145 - RNA, 243 nt, synthetic construct
  source 1..243: mol_type = other RNA
aggcccagggccctgaagttcgccgacgtggccgtgtacttcagccccgaggagtggggctgcctgaggcccgcccagaggaccctgtacagggacgtgatgagggagacctacggccacctgggcgccctgggctgcgccggccccaagcccgccctgatcagctggctggagaggaacaccgacgactgggagcccgccgccctggacccccaggagtaccccaggggcgtgaccgtgcag

SEQ ID NO: 19146 - RNA, 243 nt, synthetic construct
  source 1..243: mol_type = other RNA
atggacgccctgaccttcgacgacgtgcacgtgcacttcaccagggaggagtggagcctgctggaccccagccagaagaggctgtacaaggacgtgatgctggagatctacaagaacctgaccgccatcggctacaagtggaaggaccacaacgtgggcgagcacagccagaacgacaggaggtacggcaggcacgagaggagccccgccggcgagaaccacaacgagtacacccagtgcgac

SEQ ID NO: 19147 - RNA, 243 nt, synthetic construct
  source 1..243: mol_type = other RNA
gtgaccttcgacgacgtggccgtgaacttcaccatggaggagtgggccctgctggaccccagccagaagaagctgtacagggacgtgatgtgggagaacttcaggaacgtgaccgccatcggcaggaactgggacaaccagcagatcgaggaccagtacaagaactacaggaacaacctgaggaagaccagcgccgacttccagagcctgcagaagcacgccatgaccaaccccgaggagaag

SEQ ID NO: 19148 - RNA, 243 nt, synthetic construct
  source 1..243: mol_type = other RNA
ttccagagcgaggtgatgttcagggacgtgaccgtgaacttcagccaggaggagtgggagtgcctgaacagctacgagagggacctgtacaaggacgtgatgctggagaactacagccacctggtgagcctgggctgcagcatcagcaagcccgacgtgatcaccctgctggagcagggcaaggagccctggatgatcgtgagggacgagaggaggaggtggagccaggacctggagaccagg

SEQ ID NO: 19149 - RNA, 243 nt, synthetic construct
  source 1..243: mol_type = other RNA
gcccacgagagcctggccttcagggacgtggccatcgacctgagccaggaggagtgggagtgcctggacaccgcccagagggacctgtacagggaggtgatgctggagaactacagcaacctgatcagcctgggctgcatcatccccaagcccgacgtgatcgtgctgctggagcaggagaaggacccctggctggagaccagggaggagaccaggaggaggagcagcgacttcaccaagaag

SEQ ID NO: 19150 - RNA, 243 nt, synthetic construct
  source 1..243: mol_type = other RNA
gcccacagcatggtgatgttcagggacgtgaccgtggacttcagccaggaggagtgggagtgcctgagcagctacgagagggacctgtacagggacgtgatgctggagaactacagccacctggtgagcctgggctgcagcatcagcaagcccgacgtgatcaccctgctggagcagggcaaggagccctggatgatcgtgagggccgagaagaggaggtggagcagggacctggagagcagg

SEQ ID NO: 19151 - RNA, 243 nt, synthetic construct
  source 1..243: mol_type = other RNA
cccaccgcccccgtggccttcagcgacctgaccatctgcttcagccaggaggagtggggctggctgagccccacccagaagctgctgtacgaggaggtgatgctggagaactaccagaacctggtgagcgtgggcctgtgcaccaggaagccccacatcatcaccctgctggagaagggcaaggacccctggatcgccgagcccctgaggaagaggggcggccccgaccccgccagcaggtac

SEQ ID NO: 19152 - RNA, 243 nt, synthetic construct
  source 1..243: mol_type = other RNA
gagccctgggccgtgaccttcgccgacgtggccgtgtacttcagcagcgaggagtggaggtgcctgaggcccgcccagagggccctgtacagggacgtgatgagggacacctacggcctgctgagcgccctgggcggcggcggcaccaagcccgccctgatcagctgggtggagggcgaggccgagctgtgggaccccgacgcccaggaccccgaggtggtgaggtggcccgccgaggccgac

SEQ ID NO: 19153 - RNA, 243 nt, synthetic construct
  source 1..243: mol_type = other RNA
agccaggtgagcctgaccttcgaggacgtggccgtgctgttcaccagggacgagtggaagaagctggtgcccagccagaggagcctgtacagggaggtgatgctggagaactacagcaacctggccagcctggccggcttccccttcaccaagcccaaggtgatcagcctgctgcagcagggcgaggacccctggaaggtggaggaggagggccccggcggcttcagcctgggcctgaagtgc

SEQ ID NO: 19154 - RNA, 243 nt, synthetic construct
  source 1..243: mol_type = other RNA
ccccagaagagcgtgaccttcgaggacgtggccgtgtacttcacccagaccgagtgggacggcctgagccccgcccagagggccctgtacagggacgtgatgctggagaactacggcaacgtggccagcctgggcttcagcctgctgaagcccgccgtgatcagccagctggagggcgccggcgagctgggcaggcccagccccctggtggccggcaccgagatcggcctgcagggcctgtgg

SEQ ID NO: 19155 - RNA, 243 nt, synthetic construct
  source 1..243: mol_type = other RNA
ttccagggcagcgtgagcttcaaggacgtgaccgtggacttcagcagggaggagtggcagcagctggacctggcccagaagagcctgtacagggacgtgatgctggagaactacttcaacctgatcagcgtgggctgccaggtgcccaagcccgaggtgatcttcaacctggagaggggcgagcagccctgcatgctggacggcgagatcagcagccagagctacctggaccagggcatcggc

SEQ ID NO: 19156 - RNA, 243 nt, synthetic construct
  source 1..243: mol_type = other RNA
gcccagggcctgatggccttcgaggacgtggccgtgtacttcagcagggaggagtggggcctgctggacgccgcccagagggccctgtacaggagggtgatgctggagaacttcaccctgctggccagcctgggcctgagcgtgagcaggccccacgtggtgatccagctggagtgcggcaaggagccctgggtgctgaacggcaccgacgtgaccctggccaggaacgcccagaggaggccc

SEQ ID NO: 19157 - RNA, 243 nt, synthetic construct
  source 1..243: mol_type = other RNA
agccagggcagcctgagcttcagggacgtgaccgtgggcttcacctgggaggagtggcagcagctggaccccgcccagagggccctgtacagggacgtgatgctggagacctacagccacctgctgagcgtgggctactgcatccccaagcccgaggtgatcctgaagctggagcagggcgaggagccctggatcctggaggaggagagcagcagccagagcgtgcccgagctgatcaacagc

SEQ ID NO: 19158 - RNA, 243 nt, synthetic construct
  source 1..243: mol_type = other RNA
agccacggccccctgagcttcgaggacgtggccatcgccttcaccaaggaggagtggcagcagctggaccccgcccagaggaccctgtacagggacgtgatgctggagaacttcagccacctggtgagcctgggccaccccgtgagcaagcccgacatcatcagcaggctggagcagggcgaggagccctggatcatcaagagggacatcagcgactggatctgccccgagagggagaccagg

SEQ ID NO: 19159 - RNA, 243 nt, synthetic construct
  source 1..243: mol_type = other RNA
gcccagggcagcgtgatgttcagcgacgtgagcatcgacttcagccaggaggagtgggagtgcctgaacgacgaccagagggacctgtacagggacgtgatgctggagaactacagcaacctggtgagcatgggccactgcatcagcaagcccgacgtgatcagcttcctggagcagggcaaggagccctggctggtggacagggagcccaccaggtaccagtggcccgtgctggagagcagg

SEQ ID NO: 19160 - RNA, 243 nt, synthetic construct
  source 1..243: mol_type = other RNA
agccaggagcccgtgaccttcgaggacgtggccgtgtacttcacccagaaccagtgggccagcctggaccccatgcagagggccctgtacctggaggtgatgctggagaactacgccaacatcaccagcctggccgccctgcccttccccaagcccgacctgatcctgcagctggagcagggcgaggccccctggggcctggacccctggacccccctggagagggaggccctgggcggcgtg

SEQ ID NO: 19161 - RNA, 243 nt, synthetic construct
  source 1..243: mol_type = other RNA
agccaggagagcgtgagcttcgaggacgtggccgtgtacttcaccaggaaccagtgggccagcctggacagcgcccagaggaccctgtacagggaggtgatgctggagaactacgccaacgtgaccagcctggccgccttccccttccccaagcccgacctgatcttccagctggagaggggcaaggcccccggcggcctggacccctggacccccatcaggagggaggtgaggggcgtgtgc

SEQ ID NO: 19162 - RNA, 243 nt, synthetic construct
  source 1..243: mol_type = other RNA
agcaaggacctggtgaccttcggcgacgtggccgtgaacttcagccaggaggagtgggagtggctgaaccccgcccagaggaacctgtacaggagggtgatgctggagaactacaggagcctggtgagcctgggcgtgagcgtgagcaagcccgacgtgatcagcctgctggagcagggcaaggagccctggatggtgaagaaggagggcaccaggggcgcctgccccgactgggagtacgtg

SEQ ID NO: 19163 - RNA, 243 nt, synthetic construct
  source 1..243: mol_type = other RNA
aggcccgagagcgtgaccttcgaggacgtggccatctacttcagcgagaacgagtggaccggcctggcccccgcccagagggccctgtacagggacgtgatgctggagaactacggcgccctggccagcctggccgccttccccttccccaagcccgccctgatcttccagctggagcagggcgaggccccctggagcagcgccccccagggcgccctggacggcgagggccccaggggcatc

SEQ ID NO: 19164 - RNA, 243 nt, synthetic construct
  source 1..243: mol_type = other RNA
agccaggaggccgtgaccttcgaggacgtggccgtgaacttcagcaacgaggagtggcagtgcctgacccacgcccagaggcacctgtacaaggacgtgatgctggagaactacggcaacgtggtgagcctgggcttccccttccccaagccccccctgatcagccacctggagcaggaggccgagctgtgcgtgcaggacggccaggacagggagttcctgagctgcagccaccccgtgagc

SEQ ID NO: 19165 - RNA, 243 nt, synthetic construct
  source 1..243: mol_type = other RNA
ttccagggcagcctgagcttcagggacgtggccgtgggcttcaccaggaaggagtggcagcagctggaccccacccagaggaccctgtacagggacgtgatgctggagaactacagccacctggtgagcgtgggctgccaggtgaccaagcccgccgtgatcagcaggctggagcagggccaggagccctggatgaaggaggaggagatcctgaggtggagcttccccgaggtgctgcaggtg

SEQ ID NO: 19166 - RNA, 243 nt, synthetic construct
  source 1..243: mol_type = other RNA
agccacaccctggtgaccttcaaggacatcctggtgaacttcaccagggaggagtggaagctgctggacaccgcccagcagatcatgtacaaggacgtgatgctggagaactacaggaacctggtgagcctgggccaccagctgcccaagcccgacgtgatcctgaggctggagaagggcgaggagccctggctggtggagaaggagatccaccaggagacccaccccgacctggagaccccc

SEQ ID NO: 19167 - RNA, 243 nt, synthetic construct
  source 1..243: mol_type = other RNA
gccctggagagcgtgaccttcagggacgtggccgtgttcttcagcagggacgagtggctgcacctgaaccccgcccagagggccctgtacagggaggtgatgctggacaactacagcgccctgctgagcctgggcatcctgttcagcaagcccaaggtgatcctgcagctggagcagggcgaggacccctggatggtggagaacggcgtgagccagagcgcctgcctgggctgggagagcctg

SEQ ID NO: 19168 - RNA, 243 nt, synthetic construct
  source 1..243: mol_type = other RNA
gaggagctgcccgtggtgttcgaggacgtggccgtgtacttcaccagggaggagtggggcatgctggtgaagaggcagaaggagctgtacagggacgtgatgaggatgaactacgagctgctggccagcctgggccccgccgccgccaagcccgacctgatcagcaagctggagaggagggccgccccctggatcaaggaccccaacggccccaagtggggcaagggcaggccccccggcaag

SEQ ID NO: 19169 - RNA, 243 nt, synthetic construct
  source 1..243: mol_type = other RNA
agccagggcctggtgaccttcggcgacgtggccctggacttcagccaggaggagtgggagtggctgaaccccagccagaaggacctgtacagggacgtgatgctggagaactacaggaacctggtgtggctgggcctgagcatcagcaagcccaacatgatcagcctgctggagcagggcaaggagccctggatggtggagagggagatgagccacggccagtgcgccgactgggagagctgg

SEQ ID NO: 19170 - RNA, 243 nt, synthetic construct
  source 1..243: mol_type = other RNA
ttcgagagcgtggtgttcgaggacgtggccgtggacttcacccccgaggagtgggccctgctggaccccgcccagaggaacctgtacagggacgtgatgctggagaccttcaggaacctggccagcgtgggcgagaactggaagtgccacagcatcgaggaccagcacaagaaccagggcacccacctgaggtggagggtggtggagatccccagcgagaacaacgagagcaaccagtgcggc

SEQ ID NO: 19171 - RNA, 243 nt, synthetic construct
  source 1..243: mol_type = other RNA
gcccaggagagcgtgatgttcagcgacgtgagcatcgacttcagccaggaggagtgggagtacctgaacgacgaccagagggacctgtacagggaggtgatgctggagaactacagcaacctggtgagcatggccggccacagcatcagcaagcccgacgtgatcagcttcctggagcagggcaaggagccctggctggtggacagggagctgaccagggaccagtggcccgtgctggagagc

SEQ ID NO: 19172 - RNA, 243 nt, synthetic construct
  source 1..243: mol_type = other RNA
gcccaggtgcccgtgaccttcgaggacgtggccgtgtacttcagcagggaggagtgggccgccctggacggcaggcagaaggagctgtacagggacgtgatgaggggcaactacgagctggtggccagcctgggctgccccgccgccaagcccgacctgatctgccagatcgagagggacgaggagctgggcgtgggcgagccccagggcaggcccgtgaggaggcagccccagaggaggagc

SEQ ID NO: 19173 - RNA, 243 nt, synthetic construct
  source 1..243: mol_type = other RNA
caggccgaggtgaccttcgaggacgtggccgtgctgttcagcagggaggagtggggcaggctgagccccgcccagaggggcctgtacagggacgtgatgctggagacctacaggaacctggtgagcctgggcgccggccccgccggccccaagcccggcgtgatcacccagctggagaggggcgacgagccctgggtgctggacgcccagggcgccaagggcaaggagaggctgagggtgagc

SEQ ID NO: 19174 - RNA, 243 nt, synthetic construct
  source 1..243: mol_type = other RNA
aggctggagagcgtgaccttcgaggacgtggccgtgtacttcacccagaaccagtgggccagcctgaaccccgcccagagggccctgtacggcgaggtgatgctggagaactacgccaacgtggccagcctggtggccttccccttccccaagcccgccctgatcagccacctggagaggggcgaggccccctggggccccgacccctgggacaccaagatccccaggggcatcggccagggc

SEQ ID NO: 19175 - RNA, 243 nt, synthetic construct
  source 1..243: mol_type = other RNA
agcaaggcccccatcaccttcggcgacctggccatctacttcagccaggaggagtgggagtggctgagccccatccagaaggacctgtacgaggacgtgatgctggagaactacaggaacctggtgagcctgggcctgagcttcaggaggcccaacgtgatcaccctgctggagaagggcaaggccccctggatggtggagcccgtgaggaggaggcaggcccccgacagcggcagcaagtgc

SEQ ID NO: 19176 - RNA, 243 nt, synthetic construct
  source 1..243: mol_type = other RNA
aggcccagggccgtgaagttcgccgacgtggccgtgtacttcagccccgaggagtggggctgcctgaggcccgcccagagggccctgtacagggacgtgatgagggagacctacggccacctgggcgccctgggctgcgccggccccaagcccgccctgatcagctggctggagaggaacaccgacgactgggagcccgccgccctggacccccaggagtgccccaggggcctgaccgtgcag

SEQ ID NO: 19177 - RNA, 243 nt, synthetic construct
  source 1..243: mol_type = other RNA
aggagcgaggccctgagcttcgccgacgtgagcgtgagcttcagcagggaggagtggggctgcctgaggcccgcccagaaggccctgtacagggacgtgatgagggagacctgcggcctgctgggcgccctgggcctgagcggccccaagcccgccttcatcagctggctggagggcgagatggaggcctggagccccgaggcccacgagcccgagagggagagcagggccgccgacgccagg

SEQ ID NO: 19178 - RNA, 243 nt, synthetic construct
  source 1..243: mol_type = other RNA
cccaaggtgcccgtgagcttcgaggacgtgagcgtgtacttcaccaagaccgagtggaagctgctggacgtgcagcagaggatcctgtacaagaccgtgatgctggagaactaccaccacctggtgagcctgggctgcctgagcaccaagccccacctggtgagctggctggagcagggcgagggcccctggaccaccgacatctggaggacccccgccaccgccaagacccagaccgagggc

SEQ ID NO: 19179 - RNA, 243 nt, synthetic construct
  source 1..243: mol_type = other RNA
agcagcgtgaccttcgaggacgtggccgtgtacttcagccaggaggagtggaggttcctgaacaaggcccagaagcacctgtaccacgacgtgatgctggaggtgttcgccctgatcgccagcctgggcggcggccagggcgccctggaggccgccgcccccagcgagcagaacgtgagcggcggcggcagccagaaggcctacgcccaggactgcagcctggacaccaaccccggccagacc

SEQ ID NO: 19180 - RNA, 243 nt, synthetic construct
  source 1..243: mol_type = other RNA
agccaggccagcgtgagcttcaaggacgtgaccgtggagttcacccaggacgagtggaggctgatgagcagcgcccagaggaccctgtacagggaggtgatgctggagaactacagccacctgatcagcatgggctactgcagcaccaagcccgagctgatcttcgccctggagcagaaggacttcagggagagcatcctggagagggagagcctgagcaccatcccccccgaggacttccag

SEQ ID NO: 19181 - RNA, 243 nt, synthetic construct
  source 1..243: mol_type = other RNA
ccccagaagagcgtgaccttcgaggacgtggccgtgtacttcacccagaccgagtgggacggcctgagccccgcccagagggccctgtacagggacgtgatgctggagaactacggcaacgtggccagcctgggcttccccctgctgaagcccgccgtgatcagccagctggagggcggcggcaagctgggcggccccagccccctggccagcggcaccggcaccggcccccagggcctgtgg

SEQ ID NO: 19182 - RNA, 243 nt, synthetic construct
  source 1..243: mol_type = other RNA
aggcccagggccgtgaagttcgccgacgtggccgtgtacttcagccccgaggagtgggagtgcctgaggcccgcccagagggccctgtacagggacgtgatgcaggagacctacggccacctgggcgccctgggctgcgccggccccaagcccgccctgatcagctggctggagaggaacaccaacgactgggagctggccgccctggacccccaggagtgccccaggcagatgaccgtgcag

SEQ ID NO: 19183 - RNA, 243 nt, synthetic construct
  source 1..243: mol_type = other RNA
aagcccggcgccgtgagcttcgccgacgtggccgtgtacttcagccccgaggagtggggctgcctgaggcccgcccagagggccctgtacagggacgtgatgagggagacctacggccacctgggcgccctgggcttccccggccccaagcccgccctgatcagctggatggagcaggagagcgaggcctggagccccgccgcccaggaccccgaggagggcgagagcctgggcggcgccctg

SEQ ID NO: 19184 - RNA, 243 nt, synthetic construct
  source 1..243: mol_type = other RNA
gtgttcgacgccgtgaccttcaccgacgtggccgtggacttcagccaggacgagtgggagaggctgaccctggcccagaggaccctgtacaagaaggtgatgctggagaactacagcaacctggccagcctgggcctgtgcatcagcaagcccgacgtgatcagcagcctggagcaggacaaggagccctggaccatgaagggcgagctgaccaggggcccctgcgccgacctggagtacgtg

SEQ ID NO: 19185 - RNA, 243 nt, synthetic construct
  source 1..243: mol_type = other RNA
gcccagatgctggtgaccttcgaggaggtggccgtgtacttcacccagggccagggcgccctgctgggccccgcccagagggccctgtacagggacgtgatgcaggagaactacgagatggtgaccagcctgggcttcagcctgcccaagcccgagctgatcagcaggctggagaggggcgaggagccctgggtgcccgacctgcaggcctgcgagaagagggagagcctgaggggcgccagg

SEQ ID NO: 19186 - RNA, 243 nt, synthetic construct
  source 1..243: mol_type = other RNA
caggagagcgtgaccttcaaggacgtggccgtggacttcacccaggaggagtggcaccacatggaccccacccagaggatcctgtacagggacgtgatgctggagacctacagccacctggtgagcctgggctaccaggtgagcaagcccgaggtgatcttcaagctggagcagggcgaggagccctggatcagcgaggaggagatccagaggcccttctgccccgactgggagatcaggccc

SEQ ID NO: 19187 - RNA, 243 nt, synthetic construct
  source 1..243: mol_type = other RNA
acccaggaccccgtggtgttcgaggacgtggccgtggacttcacccaggaggagtgggccctgctgaacctggcccagaggaacctgtacagggacgtgatgctggagaacttccagaacctggccagcctgggctaccccctgcacatcccctacctgatcagccagtggaagcaggaggaggacctgggcaccgtggagaggggcaccatccagggcgagcaccaggagggcttcgagacc

SEQ ID NO: 19188 - RNA, 243 nt, synthetic construct
  source 1..243: mol_type = other RNA
agcaagggcagcctgatgttcagggacgtgagcatcgacttcagccaggaggagtgggagtgcctggacagcggccagatgaacctgtacaaggaggtgatgctggagaacttcagcaacctggtgagcgtgggcctgagcagcagcaagcccgccgtgatcagcctgctggagcagggcaaggagccctggatggtggacagggagctgaccaggggcctgtgcagcgacctggagagcatg

SEQ ID NO: 19189 - RNA, 243 nt, synthetic construct
  source 1..243: mol_type = other RNA
gcctgcgagagcatcaccttcggcgacgtggccatcgacttcagccaccaggagtgggagtacctgaacctggtgcagaagaccctgtaccaggaggtgatgatggagaactacgacaacctggtgagcctgggccacttcatcagcaagcccgacctgatcaccctgctggagcagggcaaggagccctggatgatcgtgggcgaggagaccaggggcgagtgcaccgacctggacagcagg

SEQ ID NO: 19190 - RNA, 243 nt, synthetic construct
  source 1..243: mol_type = other RNA
gcccaggagagcgtgatgttcagcgacgtgagcatcgacttcagccaggaggagtgggagtgcctgaacgacgaccagagggccctgtacagggacgtgatgctggagaactacagcaacctggtgagcatggccggccacagcatcagcaagcccgacgtgatcagcttcctggagcagggcaaggagccctggctggtggacagggagctgaccaggggccagtggcccgtgctggagagc

SEQ ID NO: 19191 - RNA, 243 nt, synthetic construct
  source 1..243: mol_type = other RNA
ccccagggctgcgccatcagcgaggacgtgttcgtgtacttcagcagggaggagtgggtgctgctggacgaggaccagaggctgctgtacagggacgtgatgctggagaacttcgccctgctggccagcctgggcatcgccagcagcaggagccacctggtgacccagctggagcagggcgaggagccctggatgcccgcccaggtggacatgacccccgccaccgagaaggaggcccagaag

SEQ ID NO: 19192 - RNA, 243 nt, synthetic construct
  source 1..243: mol_type = other RNA
tggcccgagagcgtgaccttcgaggacgtggccgtgtacttcacccagaaccagtgggccagcctggaccccgcccagagggccctgtacagggaggtgatgctggagaactacgccaacgtggccagcctggtggccttccccttccccaagcccgccctgatcagccacctggagaggggcgaggccccctggggccccgacccctgggacaccgagatccccaggggcatcagccagggc

SEQ ID NO: 19193 - RNA, 243 nt, synthetic construct
  source 1..243: mol_type = other RNA
aggcccagggccgtgaagttcggcgacgtggccctgtacttcagcagggaggagtggggctgcctgaggcccgcccagagggccctgtacagggacgtgatgcaggagacctacggccacctgggcgccctgggctgcgccggccccaagcccgccctgatcagctggctggagaggaacaccgacgactgggagaccgccgccctggacccccaggagtgccccaagggcgtggccgtgcag

SEQ ID NO: 19194 - RNA, 243 nt, synthetic construct
  source 1..243: mol_type = other RNA
agcctggagcaggtgagcttcaaggacgtgtgcgtggacttcacccaggaggagtggtacctgctggaccccgcccagaagatcctgtacagggacgtgatcctggagaactacagcaacatcgtgagcgtgggccactgcggcaccaagcccgaggtgatcttcaagatcgagcagggcgaggagccctgggtgctgggcgagggcttcagcagcctgcagcaccccgagaggaactggaag

SEQ ID NO: 19195 - RNA, 243 nt, synthetic construct
  source 1..243: mol_type = other RNA
aaggaggccagcgtggccttcagggacgtggccgtggacttcacccaggaggagtggaggctgctgagccccgcccagaggaccctgcacagggaggtgatgctggagacctacaaccacctggtgagcctggagatccccagcagcaagcccaagctgatcgcccagctggagaggggcgaggagccctggagggaggagaggaagtgcagcctggacctgtgccccgagagcaagcccgag

SEQ ID NO: 19196 - RNA, 243 nt, synthetic construct
  source 1..243: mol_type = other RNA
caggccgaggtgaccttcgaggacgtggccgtgctgctgagcagggaggagtggggcaggctgggccccgcccagaagggcctgtacagggacgtgatgctggagacctacaggaacctggtgagcctgggcgccggccacgccggccccaagcccggcgtgatcgcccagctggagaggggcgacgagccctgggtgctggacatgcagggcagggagcagagcaccatcgacggcagcgcc

SEQ ID NO: 19197 - RNA, 243 nt, synthetic construct
  source 1..243: mol_type = other RNA
ttccaggaggccgtgaccttcaaggacgtggccgtggccttcaccgaggaggagctgggcatgctggacagcgcccagaagaagctgtacagggacgtgatgctggagaacttcaggaacctggtgagcgtgggccaccagagcttcaagcccgacatgatcagccagctggagagggaggagaagctgtggatgaaggagctgcagacccagaggggcaagcacagcggcgagtactgcgcc

SEQ ID NO: 19198 - RNA, 243 nt, synthetic construct
  source 1..243: mol_type = other RNA
atgggcctgctgaccttcagggacgtggccatcgagttcagcctggaggagtggcagtgcctggacaccgcccagaagaacctgtacaggaacgtgatgctggagaactacaggaacctggccttcctgggcatcgccgtgagcaagcccgacctgatcatctgcctggagaaggagaaggagccctggaacatgaagaggcacgagatggtggacgagccccccgacatctgcccccacttc

SEQ ID NO: 19199 - RNA, 243 nt, synthetic construct
  source 1..243: mol_type = other RNA
accctggagagcgtgaccttccaggacgtggccgtggacttcacccaggaggagtgggccctgctggacaccagccagaggaccctgttcagggaggtgatgctggagaacatcagccacctggtgagcgtgggcaaccagctgtacaagagcgacgtgatcagccacctggagcagggcgagcagctgagcagggagggcctgggcttcctgcagggccagagccccgtgatcagcgacagg

SEQ ID NO: 19200 - RNA, 243 nt, synthetic construct
  source 1..243: mol_type = other RNA
gaggagccccccgtggtgttcgaggacgtggccgtgtacttcaccagggaggagtggggcaccctggtgaccaggcagaaggagctgtacagggacgtgatgaggctgaactacgagctgctggccagcctggagcccgccgccgccaagcccgacctgatcagcaagctggagaggagggccgccccctggatcagggaccccagcggccccaagtggggcaagggcaggccccccggcaag

SEQ ID NO: 19201 - RNA, 243 nt, synthetic construct
  source 1..243: mol_type = other RNA
atgctggcccccgtgaccttcgaggacgtgaccgtggtgttcaccgaggccgagtgggtgaccctgagcaccgagcagaagaacctgtacaaggaggtgaccctggagacctacaggaacctgctgagcctggccgagcccacccccgagacctaccccggccccagctgcctgctgcccttcagctgccagcagttcctgagccagcacgtgctgcagatcttccccggcgtgtgcgccgag

SEQ ID NO: 19202 - RNA, 243 nt, synthetic construct
  source 1..243: mol_type = other RNA
ttccagggcagcatcagcttcaaggacgtgaccgtgggcttcagccaggaggagtggcagcacctgaaccccagccagagggccctgtacagggacgtgatgctggagaactacagcaacctggtgagcgtgggctactgcgtgcacaagcccgaggtgatcagcaggctggagcagggcgaggagccctggaggctggaggaggagttccccagccagagcttcagcgaggtgtggaccgcc

SEQ ID NO: 19203 - RNA, 243 nt, synthetic construct
  source 1..243: mol_type = other RNA
atggccttcagggacgtggccgtggccttcagccagaaggagtggaagctgctgagccccgcccagaggaccctgtacagggacgtgatgctggagaactacagcctgctggtgagcctgggcatcgccttccccaagcccaagctgatcacccagctggagcagggcgacgagccctggagggaggagagcgagtgcttcctggacctgtacagcgagcccaggaccgagttccagccctgc

SEQ ID NO: 19204 - RNA, 243 nt, synthetic construct
  source 1..243: mol_type = other RNA
gaggaggtgcccgtggtgttcgaggacgtggccgtgtacttcaccagggaggagtggggcaccctggacaagaggcagaaggagctgtacagggacgtgatgaggatgaactacgagctgctggccagcctgggccccgccgccgccaagcccgacctgatcagcaagctggagaggagggccgccccctggatcaaggaccccaacggccccaagtggggcaagggcaggccccccggcaag

SEQ ID NO: 19205 - RNA, 243 nt, synthetic construct
  source 1..243: mol_type = other RNA
aggcaggccttcctggccttcggcgacgtgaccgtggacttcacccagaaggagtggaggctgctgagccccgcccagagggccctgtacagggaggtgaccctggagaactacagccacctggtgagcctgggcatcctgcacagcaagcccgagctgatcaggaggctggagcagggcgaggccccctggggcgaggagaggaggaggaggcccggcccctgcgccggcatctacgccgag

SEQ ID NO: 19206 - RNA, 243 nt, synthetic construct
  source 1..243: mol_type = other RNA
agcgtggccttcgaggacgtggccgtgaacttcacccaggaggagtgggccctgctgagccccagccagaagaacctgtacagggacgtgatgctggagaccttcaggaacctggccagcgtgggcatccagtggaaggaccagaacatcgagaacctgtaccagaacctgggcatcaagctgaggagcctggtggagaggctgtgcggcccccaggagggcagcgagcacagggagaccttc

SEQ ID NO: 19207 - RNA, 243 nt, synthetic construct
  source 1..243: mol_type = other RNA
atcaagagccccctgaccttcggcgacgtggccgtggagttcagcggcgaggagtgggcctggctggacagcgcccagaggagcctgcacaggagcgtgatgctggagaactacaggaacctggccagcctgggcctgtgcctgagcaagcccgagatgatcagcagcctggagcagaggaaggagccctgggccgtgaagaggaagagcaccagcggcaagtgccccgacctgcagaccctg

SEQ ID NO: 19208 - RNA, 243 nt, synthetic construct
  source 1..243: mol_type = other RNA
agccaggtgagcgtgaccttcgaggacgtggccgtgctgttcaccagggacgagtggaggaagctggcccccagccagaggaacctgtaccaggacgtgatgctggagaactacagcaacctggtgagcctgggcctgcccttcagcaagcccgaggtgatcagcctgctgcagcagggcgaggacccctggaaggtggagaaggagagccccggcggcagcagcctgggcgagtggagcagc

SEQ ID NO: 19209 - RNA, 243 nt, synthetic construct
  source 1..243: mol_type = other RNA
gaggaggtgcccgtggtgttcgaggacgtggccgtgtacttcaccagggacgagtggggcaccctggacaagaggcagaaggagctgtacagggacgtgatgcagatgaactacgagctgctggccagcctgggccccgccgccgccaagcccgacctgatcagcaagctggagcagagggccgccccctggatcaaggacccccacggccccacctggggcaagggcaggccccccggcaag

SEQ ID NO: 19210 - RNA, 243 nt, synthetic construct
  source 1..243: mol_type = other RNA
agccagagcagcgtgaccttcggcgacgtggccgtggacttcagccaggacgagtgggcctggctggacgccacccagaggagcctgtacaggagcgtgatgctggagaactacaggaacctggtgagcctgggcctgtgcagcagcaagcccgacatgatcagcagcctggagcagaggaaggagccctggaccgtgaagaggaagctgcccggcggcggctgccccgacccccaggccgtg

SEQ ID NO: 19211 - RNA, 243 nt, synthetic construct
  source 1..243: mol_type = other RNA
aagcccggcgccgtgagcttcgccgacgtggccgtgtacttcagccccgaggagtggggctgcctgaggcccgcccagagggccctgtacagggacgtgatgagggagacctacggccacctgggcgccctgggcttccccggccccaagcccgccctgatcagctggatggagcaggagagcgaggagagcgaggcctggagccccgccgccaaggaccccgaggagggcgagagcctgggc

SEQ ID NO: 19212 - RNA, 243 nt, synthetic construct
  source 1..243: mol_type = other RNA
acccacggcctggtgatgttcaaggacgtggccatcgacgtgagccaggaggagtgggagtgcctgaaccccacccagaggagcctgtacagggacgtgatgctggagaactacagcaacctggtgagcctgggcctgagcctgagcaagcccgccgtgatcagcagcctggagcagggcatggagccctggatggtggtgagggaggtgaccggcaagcagtgccccgacctggtgagcagg

SEQ ID NO: 19213 - RNA, 243 nt, synthetic construct
  source 1..243: mol_type = other RNA
agcaagctgcccgtgaccttcggcgacctggccatctacttcagccaggaggagtgggagtggctgagccccatccagaaggacctgtacgaggacgtgatgctggagaactaccagaacctggtgagcctgggcctgagcttcaggaggcccaacgtgatcaccctgctggagaagggcaaggccccctggatggtggagcccgtgaggaagaggaggggcctggacagcaagagcaagtgc

SEQ ID NO: 19214 - RNA, 243 nt, synthetic construct
  source 1..243: mol_type = other RNA
atggccttcgaggacgtggccgtgtacttcagccaggaggagtggggcctgctggacaccgcccagagggccctgtacaggagggtgatgctggacaacttcgccctggtggccagcctgggcctgagcaccagcaggcccagggtggtgatccagctggagaggggcgaggagccctgggtgcccagcaggaccgacaccatcctgagcaggaacacctacaggaggaggaaccccggcagc

SEQ ID NO: 19215 - RNA, 243 nt, synthetic construct
  source 1..243: mol_type = other RNA
gccctgggcagcgtgaccttcagggacgtggccgtgttcttcagccaggacgagtggctgcacctggacagcgcccagaagaccctgtaccaggaggtgatgctggagaactacagcaccctggtgagcctgggcatccccttcagcatgcccaaggtgatctgccagctgcagcagggcgaggacccctgcatggtggagggcgaggccctgagggacccctgcctggacttcaagacctgg

SEQ ID NO: 19216 - RNA, 243 nt, synthetic construct
  source 1..243: mol_type = other RNA
gtgaccttcgaggacgtggccctgtacttcagcagggacgagtggaggctgctggacgaggcccagaggaggctgtaccacgacgtgatgctgcagaacttcagcctgatcagcagcctgggctgctgctgcggcgccgaggacgccgagagccccttccagcccagcatgttcagggacgtgagccaggccaggaccctgaaggccgccagcctgagccagaagaaccacccctgcgagaag

SEQ ID NO: 19217 - RNA, 243 nt, synthetic construct
  source 1..243: mol_type = other RNA
ggcaaggagctgctgagcttcgaggacgtggccatgtacttcaccagggaggagtggggccacctgaacctgggccagaaggacctgtacagggacgtgatgctggagaactacaggaacatggtgctgctgggcttccagttccccaagcccgaggtgatctgccagctggagaactgggacgagcagtggatcctggacctgcccagggccggcaacaggaaggccagcggcagcgcctgc

SEQ ID NO: 19218 - RNA, 243 nt, synthetic construct
  source 1..243: mol_type = other RNA
cccaaggtgcccgtgagcttcgaggacgtggccatgtacttcaccaagaccgagtggaagctgctggaccacaggcagaggaagctgtacaagcaggtgatgctggagaactaccaccacctggtgagcctgggcttcagcttcgccaagccccagctggtgatccagctggagcagggccagaagccctgggtggccgacgtgcacaggatgaggatcaccaccggcatgcaggccggcgac

SEQ ID NO: 19219 - RNA, 243 nt, synthetic construct
  source 1..243: mol_type = other RNA
gccagggagagcgtgatgttcagcgacgtgagcatcgacttcagcctggaggagtgggagttcctgaacctggagcagagggacctgtacagggacgtgatgctggagaactacagcaacctggtgagcctgggctgcttcatcagcaagcccgacgtgatcagcctgctggagcagggcaaggagccctggaacgtggtgaggaagggcaggaggcagtaccccgacctggagaccaactac

SEQ ID NO: 19220 - RNA, 243 nt, synthetic construct
  source 1..243: mol_type = other RNA
gcccacggcagcgtgatgttcagcgacgtgagcatcgacttcagccaggaggagtgggagtacctgaacctggagcagagggacctgtacaggaacgtgatgctggagaactacagcaacctggtgagcctgggctgcttcatcagcaagcccgacgtgatcagcctgctggagcagggcaaggagccctggaaggtggtgaggaagggcaggaggccctacagcggcctggagaccaagaag

SEQ ID NO: 19221 - RNA, 243 nt, synthetic construct
  source 1..243: mol_type = other RNA
gcccagggccaggtgaccttcgaggacgtggccgtgtgcttcagccaggaggagtggggcctgctggacgagacccagaggctgctgtacaggagcgtgatgctggagaccttcagcctgatggccagcctgggcctgaccagcagcaggacccacgacatcagccagctggagaggtggggcgagcccttcctgagcgccagcggcgccatgagggccaccaggcccaccggctgctggcac

SEQ ID NO: 19222 - RNA, 243 nt, synthetic construct
  source 1..243: mol_type = other RNA
atggtgcaggagagcgtgaccttcaaggacgtggccgtgctgttcacccaggaggagtggggccagctgagccccgcccagagggccctgtacagggacgtgatgctggagaactacagcaacctggtgagcctgggcctgctgggccccaagcccgacatgttcagccagctggagaagagggaggtgtggatgcccgaggacacccccggcggcttctgcctggactggatgaccatgccc

SEQ ID NO: 19223 - RNA, 243 nt, synthetic construct
  source 1..243: mol_type = other RNA
aggcccagggccgtgaagttcgccgacgtggccgtgtacttcagcaccgaggagtggggctgcctgaggcccgcccagagggccctgtacagggacgtgatgagggagacctacggccacctgggcgccctgggctgcgccggccccaagcccgccctgatcagctggctggagaggaacaccgacgactgggagcccgccgccctggacccccaggagtgccccaagagggtgaccgtgcag

SEQ ID NO: 19224 - RNA, 243 nt, synthetic construct
  source 1..243: mol_type = other RNA
gaccaggagagcctgaccctggaggacgtggccgtggacttcagcagggaggagtggcagctgctggcccccgcccagaaggacctgtacagggacgtgatgctggagaactacaggaacctggtgagcctgggctaccaggccagcacccccgacgccctgtgcatgctggagaggggcgagggcccctgggccaccggcgaggccgtgaggggcggcgccaggcccgagaccaggaaggtg

SEQ ID NO: 19225 - RNA, 243 nt, synthetic construct
  source 1..243: mol_type = other RNA
aagcccggcgtgctgaccttcgccgacgtggccgtgtacttcagcagcgaggagtggggctgcctgaggcccgcccagagggccctgtacagggacgtgatgagggagacctacggccacctgggcgccctgggctgcgccggccccaagcccgccctgatcagctggctggagaggaacaccgacgactgggagcccgccgccctggacccccaggagtgccccaagagggtgaccgtgcag

SEQ ID NO: 19226 - RNA, 243 nt, synthetic construct
  source 1..243: mol_type = other RNA
gtgagggagcccctgaccttcgaggacgtggccgtgaacttcacccaggaggagtggcagcagctggaccccgcccagaagaccctgcacagggacgtgatgctggagatctacagccacctggtgagcgtgggctgcagcggcatcaagcccgacatcatcagcaagctggagcacggcgaggacccctggatcagggagagcgagctgcccaggtggacctacagcgacagggagaagagc

SEQ ID NO: 19227 - RNA, 243 nt, synthetic construct
  source 1..243: mol_type = other RNA
ccccaggtgctggtgagcttcgaggaggtggccgtgctgctgagccaggaggagtggggccacctgggccccgaccagaagaggctgtacagggacgtgatgctggagacctacggcaacctggtgagcctgggcctgcagggcagcaagcccgacgtgatcagcaagctggagcagggcgaggagccctgggccccccacagccccaggatcgagggcagctggatctggaggaggaggagg

SEQ ID NO: 19228 - RNA, 243 nt, synthetic construct
  source 1..243: mol_type = other RNA
taccaggagatggtgaccttcgaggacgtggccgtgcacttcaccaagaccgagtggaccggcctgagccccgcccagagggccctgtacaggagcgtgatgctggagaacttcggcaacctgaccgccctgggctaccccgtgcccaagcccgccctgatcagcctgctggagggcggcgacatggactggggcctggaggcccaggacgacccccccgccgagaggaccaagaacgtgtgc

SEQ ID NO: 19229 - RNA, 243 nt, synthetic construct
  source 1..243: mol_type = other RNA
tggaaggagctgctgagcttcgaggacgtggccctgttcttcaccagggaggagtggaaccagctggactgggcccagaaggacctgtacagggacgtgatgctggagaactacaggaacctgatcctgctgggcttccagttccccaagcccgaggtgatctgccagctggagcagtgggaggagccctggatcctggacctgcccagggccggcaccaggaaggccagcggcagcgcctgc

SEQ ID NO: 19230 - RNA, 243 nt, synthetic construct
  source 1..243: mol_type = other RNA
gcccaggcccccctgagcttcgaggacgtggccgtgggcttcagccccgaggagtggcagctgctggcccccgcccagaaggacctgtacagggacgtgatgctggagaactacaggaacctggtgagcctgggctaccaggccagcaagcccgacagcctgttccagctggagcacggcggccccccctgggccgtgggcggcgccgcccccaggcccccctgcgccgaggagatctgggag

SEQ ID NO: 19231 - RNA, 243 nt, synthetic construct
  source 1..243: mol_type = other RNA
ccccagggccacctgaccttcatggacgtggccatcgagttcagccaggaggagtggaagtgcctggaccccggccagagggccctgtacagggacgtgatgctggagaactacaggaacctggtgagcctgggcatctgcctgcccgacctgagcatcatcagcatgctgaagcagaggagggagcccctgaccctgcagagcgaggtgaagatcgtgaagaaccccgacggcagggagtgc

SEQ ID NO: 19232 - RNA, 243 nt, synthetic construct
  source 1..243: mol_type = other RNA
atccacgagagcgtgaccttcgaggacgtggccgtgaacttcaccgacagggagtggcagtgcctgacccacgcccagaggcacctgtacaaggacgtgatgctggagaactacggcaacatggtgagcctgggcttccccttccccaagccccccctgatcagccacctggagagggagaccgagccctgggtgcaggacctgcaggacagggagagcctgagcagcttctaccccgtgagc

SEQ ID NO: 19233 - RNA, 243 nt, synthetic construct
  source 1..243: mol_type = other RNA
gcccacgagctggtgatgttcagggacgtggccatcgacttcagcaaggaggagtgggagtgcctggacctggagcagagggacctgtacagggacgtgatgctggagaactacagcaacatggtgctgctgggcctgtgcatccaccagcccgacatgttcagcctgctggagaagggcaaggagccctggaaggtgctgaggtaccagaccaggggcccctgccccgacatgcagagcagg

SEQ ID NO: 19234 - RNA, 243 nt, synthetic construct
  source 1..243: mol_type = other RNA
gcccaggagagcgtgatgttcagcgacgtgagcatcgacttcagccaggaggagtgggagtgcctgaacgacgaccagagggccctgtacagggacgtgatgctggagaactacagcaacctggtgagcatgggccacagcatcagcaagcccgacgtgatcagcttcctggagcagggcaaggagccctggctggtggacagggagctgaccaggggccagtggcccgtgctggagagcagg

SEQ ID NO: 19235 - RNA, 243 nt, synthetic construct
  source 1..243: mol_type = other RNA
ggcagcctgaccttcagggacgtggccatcgagttcagcctggaggagtggcagtgcctggacaccgcccagcagaacctgtacaggaacgtgatgctggagaactacaggaacctggtgttcctgggcatcgccgcccccaagcccgacctgatcatcttcctggagcagggcaaggagccctggaacgtgaagaggcacgagatggtggaggagccccccgtgatctgcagccacttcgcc

SEQ ID NO: 19236 - RNA, 243 nt, synthetic construct
  source 1..243: mol_type = other RNA
ggccacgccctgctgaccttcagggacgtggccatcgagttcagccaggaggagtggggctgcctgaaccacacccagagggagctgtacagggacgtgatgctggagaactacggccacctgctgttcctgggcctgatcgtgagcaagcccgacctggtgagcttcctggagcagaccaaggacccctgggacggcaagaggaagaagaccgtggccttccaccccggcctggccctgagc

SEQ ID NO: 19237 - RNA, 243 nt, synthetic construct
  source 1..243: mol_type = other RNA
ctgcaggtgagcgtgagcttcgaggacgtgaccgtggacttcagcagggaggagtggcagcacctggaccccgcccagaggaggctgtacagggacgtgaccctggagaactacagccacctgtgcagcgtgggctaccaggtgcccaagcccgaggtgatcttcaagctggagcagggcgagggcccctggatgctggagggcgaggccccccaccagagctgcagcgacgacgacatcggc

SEQ ID NO: 19238 - RNA, 243 nt, synthetic construct
  source 1..243: mol_type = other RNA
gtggtgttcaccgacgtggccgtggacttcagccaggaggagtgggagtgcctggacagctaccagaggagcctgtacagggacgtgatcctggagaactacagcaacctggtgagcctgggcggcggcagcatcagcaagcccgacgtggtgaccctgctggagcagggcaaggagccctggatggtggtgagggacaccaagatcaggtggagcctgggcctggagagcaactacgacgcc

SEQ ID NO: 19239 - RNA, 243 nt, synthetic construct
  source 1..243: mol_type = other RNA
aagcccggcatcgtgaggttcgccgacgtggccgtgtacttcagcagggaggagtgggcctgcctgaggcccgcccagagggccctgtacagggacgtgatgagggagacctacggccacctgggcgccctgggcttccccggccccaagcccgccctgatcagctggatggagagggagagcgaggcctggagccccgccgcccaggagcccaaggagggcgagaacctgggcggcgccccc

SEQ ID NO: 19240 - RNA, 243 nt, synthetic construct
  source 1..243: mol_type = other RNA
gcccagggctacgtgaccttcgaggacgtggccgtgtacttcagccaggaggagtggaggctgctggacgaggcccagaagctgctgtacaggaacgtgatgctggagaacttcagcctgctggccagcctgggcctggccagcagcaagacccacgagatcacccagctggagagctgggaggagcccttcatgcccgcctgggaggtggtgaccagcgccacccccaggggcacctggtgg

SEQ ID NO: 19241 - RNA, 243 nt, synthetic construct
  source 1..243: mol_type = other RNA
atggccgacctggtgatgttcagggacgtgaccgtggacttcagccaggaggagtgggagtgcctgaacagcaaccagaggaacctgtacagggacgtgatcctggagaactacagcaacctggtgagcctgggcggctgcagcatcagcaagcccgacgtgatcaccctgctggagcagggcaaggagccctggatggtggtgagggacgagaagaggaggtggaggctggacctggagagc

SEQ ID NO: 19242 - RNA, 243 nt, synthetic construct
  source 1..243: mol_type = other RNA
agcctggagcccgacagcttcggcgacgtggccgtgctgttcagccaggaggagtgggccaggctggcccccgcccagagggagctgtacagggacgtgatgctggagacctacagccacctggtgagcctgggcctggccgtgagcaagcccgacgtgatcagcttcctggagcagggcaaggagccctggctgggcgagaaggccgccgccggcggcctgggccccgagctggagagcagg

SEQ ID NO: 19243 - RNA, 243 nt, synthetic construct
  source 1..243: mol_type = other RNA
gacctggaccaggtgaccttcgaggacgtggtggtggacttcaccagggaggagtggggctgcctggagcccgcccagaggaccctgtacagggacgtgatgctggagaccttcaggctgctggtgagcgtgggccactggctgcccaagcccgacgtgatcagcctgctggagcaggaggccgagctgtgggccgccgacgagggcggccccaggggcatgtgccccgacctggagaccagg

SEQ ID NO: 19244 - RNA, 243 nt, synthetic construct
  source 1..243: mol_type = other RNA
gcccacatggccttcagggacgtggccgtggacttcacccaggaggagtggatgctgctgagccccgcccagaggagcctgtacagggaggtgatgctggagaactacagcaacatggtgagcctgggcatccccttcagcaagcccaagctgatcacccagctggagcagggcaaggagacctggagggaggagaggaagtgcccccccgccacctgcagcgccgagccccagcccgagctg

SEQ ID NO: 19245 - RNA, 243 nt, synthetic construct
  source 1..243: mol_type = other RNA
ttccaggagcccgtgaccttcgaggacgtggccgtgtacttcacccagaacgagtgggccagcctgcaccccacccagagggccctgtacagggaggtgatgctggagaactacgccaacgtgaccagcctgctggccttccccttccccaagcccgccctgatcagccacctggagaggggcgaggccccctggggccccgacccctgggacaccgagatccccaggggcatcagccagggc

SEQ ID NO: 19246 - RNA, 243 nt, synthetic construct
  source 1..243: mol_type = other RNA
ttccaggaggccgtgaccttcaaggacgtggccgtggccttcaccgaggaggagctgggcctgctggacagcgcccagaggaagctgtacagggacgtgatgctggagaacttcaggaacctggtgagcgtgggccaccagagcttcaagcccgacatgatcagccagctggagagggaggagaagctgtggatgaaggagttccagacccagaggggcaagcacagcggcttcctgtgcttc

SEQ ID NO: 19247 - RNA, 243 nt, synthetic construct
  source 1..243: mol_type = other RNA
aagagcaagagcaaggcccccgtgaccttcggcgacctggccatctacttcagccaggaggagtgggagtggctgagccccatccagaaggacctgtacgaggacgtgatgctggagaactaccagaacctggtgagcctgggcctgagcttcaggaggcccaacgtgatcaccctgctggagaagggcaaggccccctggatggtggagcccgtgaagaggaggaggggcctgggccccctg

SEQ ID NO: 19248 - RNA, 243 nt, synthetic construct
  source 1..243: mol_type = other RNA
ttcaggggccccgtgaccttcaaggacatcaccgtggagttcacccaggaggagtggcagctgctggacaacgcccagaggaccctgtacagggaggtgatgcaggagaactaccaccacctgatcagcgtgggctactgcgtgaacaagcccaacgccgtgttcaagctgaagcagggcaaggagccctggatcctggaggtggagttccccaggaggaacaaccccgaggacctgtggaac

SEQ ID NO: 19249 - RNA, 243 nt, synthetic construct
  source 1..243: mol_type = other RNA
agcaaggtgcccgtgaccttcggcgacctggccatctacttcagccaggaggagtgggagtggctgagccccatccagaaggacctgtacgaggacgtgatgctggagaactaccagaacctggtgagcctgggcctgagcttcaggaggcccaacgtgatcaccctgctggagaagggcaaggccccctgggtggtggagcccgtgaggaagaggaggggcctggacagcggcttcaagtgc

SEQ ID NO: 19250 - RNA, 243 nt, synthetic construct
  source 1..243: mol_type = other RNA
agcaaggcccccatcaccttcggcgacctggccatctacttcagccaggaggagtgggagtggctgagccccatccagaaggacctgtacgaggacgtgatgctggagaactacaggaacctggtgagcctgggcctgagcttcaggaggcccaacgtgatcaccctgctggagaagggcaaggccccctggatgatcgagcccgtgaggaggaggagggcccccgacagcggcagcaagtgc

SEQ ID NO: 19251 - RNA, 243 nt, synthetic construct
  source 1..243: mol_type = other RNA
gtgcaggagcccgtgaccttcaaggacgtggccgtggacttcacccaggaggagtggggccagctggacctggtgcagaggaccctgtacagggacgtgatgctggagacctacggccacctgctgagcgtgggcaaccagatcgccaagcccgaggtgatcagcctgctggagcagggcgaggagccctggagcgtggagcaggcctgcccccagaggaccggccccgagtgggtgaggaac

SEQ ID NO: 19252 - RNA, 243 nt, synthetic construct
  source 1..243: mol_type = other RNA
ccccagaagagcgtgaccttcgaggacgtggccgtgtacttcacccagaccgagtgggacggcctgagccccgcccagagggccctgtacagggacgtgatgctggagaactacggcaacgtggccagcctgggcttcagcctgctgaagcccgccgtgatcagccagctggagggcgccggcgagctggagggccccagccccctggccgccggcaccgagatcggcccccagggcctgtgg

SEQ ID NO: 19253 - RNA, 243 nt, synthetic construct
  source 1..243: mol_type = other RNA
cccaagggcctgctgaccttcagggacgtggccatcgagttcagccaggaggagtggggctgcctgaaccacacccagagggagctgtacagggacgtgatgctggagaactacggcaacctgctgttcctgggcctgatcgtgagcaagcccgacctggtgagcttcctggagcagaagaaggagccctggagcgtgaagaggaagaagagggtgaccatccaccccgcccagaggttcggc

SEQ ID NO: 19254 - RNA, 243 nt, synthetic construct
  source 1..243: mol_type = other RNA
aggaccggccccctgaccttcggcgacgtggccgtggagttcagcggcgaggagtgggcctggctggacagcgcccagaggagcctgcacaggagcgtgatgctggagaactacaggaacctggccagcctgggcctgtgcatgagcaagcccgagatgatcagcagcctggagcagagcaaggagccctgggccgtgaaggccaagagcaccaggggcaggtgccccgacctgaacctgtgc

SEQ ID NO: 19255 - RNA, 243 nt, synthetic construct
  source 1..243: mol_type = other RNA
ttccaggagcccgtgaccttcgaggacgtggccgtgtacttcacccagaacgagtgggccagcctgcaccccatgcagagggccctgtacagggaggtgatgctggagaactacgccaacgtgaccagcctgagcgccttccccttcagcaagcccgacctgatcttccagctggagcagggcgaggccgcctggggccccgacccctggaccctggccggcggcgaggccctgaggggcatg

SEQ ID NO: 19256 - RNA, 243 nt, synthetic construct
  source 1..243: mol_type = other RNA
tgcgagggcagcgtgagcttcgaggacgtgaccatggacttcagcagggaggagtggcagcagctggaccccgcccagaggtgcctgtaccaggacgtgatgctggagatctacagccacctgctgttcgtgggctacaacatccccaaccccgagatcatcagcaggatggagaagggcgaggagccctggatgagggagatccagctgccccaccagaggcacagggagagggccttcggc

SEQ ID NO: 19257 - RNA, 243 nt, synthetic construct
  source 1..243: mol_type = other RNA
agccaggtgaccgtgaccttcgaggacgtggccgtgctgttcagcagggacgagtggaggaagctgggccccagccagaagaacctgtaccaggacgtgatgctggagaactacagcaacctggtgagcctgggcctgcccttcagcaagcccaaggtgatcagcctgctgcagcagggcgaggacccctggaaggtggagaaggagagccccggcagcttcagccccggctggaagagcagc

SEQ ID NO: 19258 - RNA, 243 nt, synthetic construct
  source 1..243: mol_type = other RNA
atggagggcctggtgatgttccaggacctgttcatcgacttcagccaggaggagtgggagtgcctggacgccgcccagaaggacctgtacagggacgtgatgatggagaactacagcagcctggtgagcctgggcctgtgcatccccaagcccgacgtgatcagcctgctggagcagggcaaggagccctggatggtgagcagggacgtgctgggcggctggtgccccgacaggctgaagaag

SEQ ID NO: 19259 - RNA, 243 nt, synthetic construct
  source 1..243: mol_type = other RNA
agccaggagagcgtgagcttcgaggacgtggccgtgtacttcacccagaaccagtgggccagcctggacagcgcccagaggaccctgtacagggaggtgatgctggagaactacgccaacgtgaccagcctggccgccttccccttccccaagcccgacctgatcttccagctggagaggggcaaggcccccggcggcctggacccctggacccccatcaggaggaaggtgaggggcgtgtgc

SEQ ID NO: 19260 - RNA, 243 nt, synthetic construct
  source 1..243: mol_type = other RNA
gcccacggcagcgtgatgttcagcgacgtgagcatcgacttcagccaggaggagtgggactacctggacctggagcagagggacctgtacagggacgtgatgctggagaactacagcaacctggtgagcctgggctgcttcgtgagcaagcccgacgtgatcagcctgctggagcagggcaaggagccctggaaggtggtgaggaagggcaggaggaggtaccccgacctggagaccaactac

SEQ ID NO: 19261 - RNA, 243 nt, synthetic construct
  source 1..243: mol_type = other RNA
ccccaggagagcgtgaccttcgaggacgtggccgtgaacttcagccacgaggagtggcagtgcctgacccacgcccagaggcacctgtacaaggacgtgatgctggagaactacggcaacatggtgagcctgggcttcagcttcagcaagccccccctgatcagcaggctggagcagggcaccgagccctacgtgcaggacaggcaggactgggagttcctgagctgcagctaccccgtgagc

SEQ ID NO: 19262 - RNA, 243 nt, synthetic construct
  source 1..243: mol_type = other RNA
agccaggagagcgtgaccttcagggacgtggccatcgacttcagccaggaggagtgggagtggctgcagcccgcccagagggacctgtacaggcacgtgatgctggagaactacagccacctggtgagcctgggcctgaacatcagcaagccctacgtggtgagcctgctggagcagggcaagggcccctggctggagaagggcgacgtgaggagggacctgttcagcgagagccacggcgag

SEQ ID NO: 19263 - RNA, 243 nt, synthetic construct
  source 1..243: mol_type = other RNA
atggccttcgaggacgtggccgtgcacttcagccaggaggagtggggcctgctggacaccgcccagaggagcctgtacaggagggtgatgctggagaacttcgccctgctggccagcctgggcctgagcgtgagcaggccccacgtggtgacccagctggagaggggcgaggagccctgggtgctgagcggcgtggacgtgaccctgccccaggacgcccagaggaggcccaggaggggcagc

SEQ ID NO: 19264 - RNA, 243 nt, synthetic construct
  source 1..243: mol_type = other RNA
agcgaggagagcgtgaccttcgaggacgtggccatctacttcagcgagaacgagtggaccggcctggcccccgcccagagggtgctgtacagggacgtgatgctggagaactacggcgccgtggccgccctggccgccttccccttccccaagcccgccctgatcagccagctggagaggggcgaggccccctggtgcaaggccccccagggcgccctggacggcgagggccccaggggcatc

SEQ ID NO: 19265 - RNA, 243 nt, synthetic construct
  source 1..243: mol_type = other RNA
agccagagcctggtgaccttcggcgacgtggccgtgaacttcagccaggaggagtgggagtggctgaacagcgcccagaggaacctgtacaggagcgtgatgctggagaactacaggaacctggtgagcctgggcctgtgcgtgagcaagcccgacatgatcagcagcctggagcagaggaaggagccctggatggtgaagaggaagctgaccaggggcaggtgccccgacctgaaggccgtg

SEQ ID NO: 19266 - RNA, 243 nt, synthetic construct
  source 1..243: mol_type = other RNA
aacagcggcctgctgaccttcagggacgtggccatcgagttcagcctggaggagtggcagtgcctggacaccgcccagaagaacctgtacaggaacgtgatgctggagaactacaggaacctggccttcctgggcgtggccgtgagcaagcccgacctgatcacctgcctggagaaggacaaggagccctggaacatgaagaggcacgagatggtggacgagccccccggcatctgcccccac

SEQ ID NO: 19267 - RNA, 243 nt, synthetic construct
  source 1..243: mol_type = other RNA
ttccaggaggccgtgaccttcaaggacgtggccgtggtgttcagcgaggaggagctgggcctgctgggccccgcccagaggaagctgtacagggacgtgatgctggagaacttcaggaacctggtgagcgtgggccacagcagcagcaagcccgacgtgatcagccagctggagagggaggagaagctgtgcaccaaggagttccacacccagggcggcggcaggaaccagaaggagatggag

SEQ ID NO: 19268 - RNA, 243 nt, synthetic construct
  source 1..243: mol_type = other RNA
gaggtgcaggagaccctgaccttcgacgacgtggccgtggccttcacctgggaggagtggcagctgctggcccccgcccagaaggccctgtacagggacgtgatgctggagaaccacagcaacctggtgagcgtgggcttccaggccagcacccccgaggtgctgagcaagctggaccagggcgagccctggaccatggacgacgaggtgcactgcaggaccaggagcgaggtgtggaagttc

SEQ ID NO: 19269 - RNA, 243 nt, synthetic construct
  source 1..243: mol_type = other RNA
ctgctggagagcgtgaccttcggcgacgtggccgtggtgttcagcagggacgagtggctgcacctggacgccgcccagaggagcctgtacagggaggtgatgctggagaactacagcgccctggtgagcctgggcatccccctgagcatccccaagctgatctgccagctgcagcagggcgaggacccctgcatggtggagagggagatcccccaggacgtgtgcctgggcttcaagacctgg

SEQ ID NO: 19270 - RNA, 243 nt, synthetic construct
  source 1..243: mol_type = other RNA
atgggcctgctgaccttccaggacgtgaccgtggacttcacccaggaggagtgggagtgcctggacctgggccagaggggcctgtacagggacgtgatgctggagaactacggcaacctggcctgcctgggcctggtggtgagcaagcccgacctggtgaccttcctggagcagatgaaggacccctggaacgtgaggaggatcgagaccgccatctaccccggcatgtgcctgctgaacatc

SEQ ID NO: 19271 - RNA, 243 nt, synthetic construct
  source 1..243: mol_type = other RNA
caggagcccgtgaccttcgaggacgtggccgtgtacttcacccagaaccagtgggccagcctggacagcgcccagagggccctgtacagggaggtgatgctggagaactacgccaacgtggccagcctggtggtgagccccttccccaggcccgacctgatcagccagctggagaggggcgaggccccctgggaccccgacccctgggaggccgaggacctgaggggcatctgccccggcggc

SEQ ID NO: 19272 - RNA, 243 nt, synthetic construct
  source 1..243: mol_type = other RNA
gtgcaggccagcctgagcttcgaggacgtggccgtgaggttcacctgggaggagtggcagctgctggaccccagccagaaggacctgtacaggaacgtgatgctggagaactactgcaacctggtgagcgtgggctaccagacccccaagcccgacagcctgttccagctggagcagggcgagcccccctggagggtggagggcgccggccagagccagacctgccccgaggagatctgggag

SEQ ID NO: 19273 - RNA, 243 nt, synthetic construct
  source 1..243: mol_type = other RNA
gcccaggtgctggtgaccttcaaggacgtggccgtgaccttcaccagggaggagtggggccagctggacctggaccagaaggccctgtaccaggaggtgatgctggagacctacggcctgctggtgagcctgggccaccccgtgcccaagcccgagctgacccacctgctggagtgcggccaggagctgtggaagggcaagaggggcctgagccacagcacctgcagcggcgacgacaccaag

SEQ ID NO: 19274 - RNA, 243 nt, synthetic construct
  source 1..243: mol_type = other RNA
ctgcagaggctgctgaccttcagggacgtggccatcgagttcagccaggaggagtggacctgcctgaaccacacccagaggaagctgtacagggacgtgatgctggagaactacggccacctgctgttcctgggcctgatcgtgagcaagcccgacctggtgagcttcctggagcagaagaaggagccctggagcgtgaagaggaagaagagggtgaccatccaccccggcaaggtggcccag

SEQ ID NO: 19275 - RNA, 243 nt, synthetic construct
  source 1..243: mol_type = other RNA
gcccagggcagcctgaccctgaaggacgtggccgtggacttcacctgggaggagtggcagctgctggaccccgaccagaaggacctgtacagggacgtgatgctggagaactacagcaacctggtgagcgtgggctaccaggtgaacaagcccgacatcctgagcatgctggagcagggcgagcccccctggaccctggaggacgaggtgcacagccacccccaccccgagaccgacaaggtg

SEQ ID NO: 19276 - RNA, 243 nt, synthetic construct
  source 1..243: mol_type = other RNA
agcctgggcagcgagctgttcagggacgtggccatcgtgttcagccaggaggagtggcagtggctggcccccgcccagagggacctgtacagggacgtgatgctggagacctacagcaacctggtgagcctgggcctggccatcagcaagcccgacgtgatcagcttcctggagcagggcaaggagccctggatggtggagagggtggtgagcaggggcctgtgccccgtgctggagagcagg

SEQ ID NO: 19277 - RNA, 243 nt, synthetic construct
  source 1..243: mol_type = other RNA
gcccagggcagcgtgatgttcaacgacgtgagcatcgtgttcagccaggaggagtgggagtacctggacctggagcagaaggacctgtacagggacgtgatgctggagaactacagcaacctggtgagcctgggctgcttcatcagcaagcccgacgtgatcagcctgctggagcagggcaaggagccctggaaggtggtgaggaagggcaggaggaggtacctggacctggagaacaggtac

SEQ ID NO: 19278 - RNA, 243 nt, synthetic construct
  source 1..243: mol_type = other RNA
aggatgaagagcgtgaccttcgaggacgtggccgtgtacttcacccagaccgagtgggacagcctgagcaccgcccagagggccctgtacagggacgtgatgctggagaactacggcaacgtggccagcctgggcttccccctgctgaagcccgccgtgatcagccagctggagggcggcggcgagctggagggccccagccccctggccagcggcgccggcaccggcccccagggcctgtgg

SEQ ID NO: 19279 - RNA, 243 nt, synthetic construct
  source 1..243: mol_type = other RNA
ttccagggcagcctgaccttcagcgacgtggccatcggcttcagccagcaggagtgggagtgcctggaccccgtgcagaagagcctgtacagggacgtgatgatggagaactacggcaacctggtgagcctgggctacagcatcagcaagcccgacgtgatcaccctgctggagcagggcaaggagccctggatggtgctgagggaggagaccaagaggtgggacaccgacagcttcctgagc

SEQ ID NO: 19280 - RNA, 243 nt, synthetic construct
  source 1..243: mol_type = other RNA
caggagcaggtgagcttcaaggacgtgtgcgtggacttcacccaggaggagtggtacctgctggaccccgcccagaagatcctgtacagggacgtgatcctggagaactacagccacctggtgagcgtgggcaactgcatcaccaagcccgaggtgatcttcaagatcgagcagggcgaggagccctggatcctggaggagaggttccccaagcagtggcacagcggcaagagctacaagtac

SEQ ID NO: 19281 - RNA, 243 nt, synthetic construct
  source 1..243: mol_type = other RNA
acccaggtgagcgtgaccttcgacgacgtggccgtgaccttcacccaggaggagtggggccacctggaccccgcccagaggaccctgtacagggaggtgatgctggagacctgcaggctgctgatgagcctgggctgccccgtgcccaggcccgagctgatctaccagcaggagcacggccaggagctgtggaccgtgaagagggacctgagcaggagcacctgcgccggctacagcagcgag

SEQ ID NO: 19282 - RNA, 243 nt, synthetic construct
  source 1..243: mol_type = other RNA
ggcctggtgatgttcaaggacgtggccatcgacgtgagccaggaggagtgggagtgcctgaaccccgcccagaggaacctgtacaaggacgtgatgctggagaactacagcaacctggtgagcctgggcctgagcgtgagcaagcccgccatgatcaccagcctggagcagggcaaggagccctggatggtgctgagggaggtgaccggcgagaggtgccccgacctggtgagcaagtgcgag

SEQ ID NO: 19283 - RNA, 243 nt, synthetic construct
  source 1..243: mol_type = other RNA
ccccaggagagcgtggccttcgaggacgtggccgtgtacttcaccgccaaggagtgggacatcatggtgcccgccgagagggccctgtacagggacgtgatgctggagaactacgaggccgtggccttcgtggtgccccccaccagcaagcccgccctggtgagccacctggagcagggcaaggagagctgcttcaccaggccccagggcgtgctgtgcaggaacgactggagggccggcctg

SEQ ID NO: 19284 - RNA, 243 nt, synthetic construct
  source 1..243: mol_type = other RNA
ccccagaagagcgtgaccttcgaggacgtggccgtgtacttcacccagaccgagtgggacggcctgagccccgcccagagggccctgtacagggacgtgatgctggagaactacggcaacgtggccagcctgggcttccccctgctgaagcccaccgtgatcagccagctggagggcggcggcgagctggagggccccagccccctgaccagcggcaccggcaccggccaccagggcctgtgg

SEQ ID NO: 19285 - RNA, 243 nt, synthetic construct
  source 1..243: mol_type = other RNA
gagcccggcgccgtgagcttcgccgacgtggccgtgtacttctgcagggaggagtggggctgcctgaggcccgcccagaggaccctgtacagggacgtgatgagggagacctacggccacctgagcgccctgggcatcggcggcaagaagcccgccctgatcagctgggtggaggaggaggccgagctgtggggccccgccgcccaggaccccgaggtggccaagtgccccacccagaccgac

SEQ ID NO: 19286 - RNA, 243 nt, synthetic construct
  source 1..243: mol_type = other RNA
agcgtgaccttcgaggacgtggccgtgtacttcagctgggaggagtgggccctgctggacgaggcccagaggtgcctgtaccacgacgtgatgctggagaacttcgccctgaccagcagcctgggctgctggcacggcgccgaggacaagggcgcccccagcgagaagagcatcagcgtggagggcgtgagccagatcaagaccctgaaggccgacagctgcccccagaagggccagcccttc

SEQ ID NO: 19287 - RNA, 243 nt, synthetic construct
  source 1..243: mol_type = other RNA
agcgtgatgttcagcgacgtgagcatcgacttcagcctggaggagtgggagttcctgaacctggagcagagggacctgtacagggacgtgatgctggagaactacagcaacctggtgagcctgggctgcttcatcagcaagcccgacgtgatcagcctgctggagcagggcaaggagccctggaaggtggtgaggcagggcaggaggcagtaccccgacctggagaccaactacgagatcaag

SEQ ID NO: 19288 - RNA, 243 nt, synthetic construct
  source 1..243: mol_type = other RNA
agctacgagggcagcgtgagcttcagggacgtggccatcgacttcagcagggaggagtggaggcacctggacctgagccagaggaacctgtacagggacgtgatgctggagacctacagccacctgctgagcgtgggctaccaggtgcccgaggccgaggtggtgatgctggagcagggcaaggagccctgggccctgcagggcgagaggcccaggcacagctgccccggcgagaagctgtgg

SEQ ID NO: 19289 - RNA, 243 nt, synthetic construct
  source 1..243: mol_type = other RNA
cagagcctggtgaccttcggcgacgtggccgtggacttcagcagggaggagtgggagtggctgaacagcgcccagaggaccctgcacagggacgtgatgctggagaactacaggaacctggtgagcctgggcctgtgcgtgagcaagcccgacatgatcagcagcctggagcagaggaaggagccctggatgctgaagaggaagctgaccaggggcaggtgccccgacctgaagaccatgcag

SEQ ID NO: 19290 - RNA, 243 nt, synthetic construct
  source 1..243: mol_type = other RNA
gaggagctgcccgtggtgttcgaggacgtggccgtgtacttcaccagggaggagtggggcgccctggacaagtggcagaaggagctgtacagggacgtgatgcagatgaactacgagctgctggccagcctgggccccgccgccgccaagcccgacctgatcagcaagctggagaggagggccgccccctggatcagggacccccacggccccaagctgggcaagggcaggcccccccccggc

SEQ ID NO: 19291 - RNA, 243 nt, synthetic construct
  source 1..243: mol_type = other RNA
aggcccagggccgtgaagttcgccgacgtggccgtgtacttcagccccgaggagtggggctgcctgaggcccgcccagagggccctgtacagggacgtgatgagggagacctacggccacctgggcgccctgggctgcgccggccccaagcccgccctgatcagctggctggagaggaacaccgacgagtgggagcccgccgccctggaccccagggagtgccccaggggcgtgaccgtgcag

SEQ ID NO: 19292 - RNA, 243 nt, synthetic construct
  source 1..243: mol_type = other RNA
gcccagaccctgctgaccttcagggacgtggccatcgagttcagcctggaggagtggaagtgcctggacctggcccagcagaacctgtacagggacgtgatgctggagaactacaggaacctgttcagcgtgggcctgaccgtgagcaagcccggcctgatcacctgcctggagcagaggaaggagccctggaacgtgaagaggcaggaggccgccgacggccaccccgccatgagcagctgc

SEQ ID NO: 19293 - RNA, 243 nt, synthetic construct
  source 1..243: mol_type = other RNA
caggccgaggtgaccttcgaggacgtggccgtgctgctgagccaggaggagtggggcctgctgggccccagccagaagggcctgtacagggaggtgatgctggagacctacaggaacctgctgagcctgggcgccggcctggccgaccccaagcccgaggtgatcgtgcagctggagaggggcgacgagctgtgggtgctggacatgcacggcgccgagcagcccagcgtggacggcagcgcc

SEQ ID NO: 19294 - RNA, 243 nt, synthetic construct
  source 1..243: mol_type = other RNA
cagatcctggagagcctgaccttccaggacgtggccgtggacttcaccagggaggagtgggaccagctgtaccccgcccagaagaacctgtacagggacgtgatgctggagaactacaggaacctggtggccctgggccaccagctgtacaagcccgaggtgatcacccagctggagcaggaggagaggtggatgatgggcagggtgagcccccccgacacccaccccgacggcgagaacagg

SEQ ID NO: 19295 - RNA, 243 nt, synthetic construct
  source 1..243: mol_type = other RNA
aagagcatggtgaccttcgaggacgtggccgtgtacttcagccaggaggagtgggagctgctggacgccgcccagaggcacctgtaccacagcgtgatgctggagaacctggagctggtgaccagcctgggctgctggcacggcgtggagggcgaggaggcccaccccgagcagaacgtgagcgtggaggtgctgcaggtgaggatccccaacgccgaccccagcaccaagaaggccaacagc

SEQ ID NO: 19296 - RNA, 243 nt, synthetic construct
  source 1..243: mol_type = other RNA
atggccctggtgaccttcagggacgtggccatcgacttcagccagaaggagtgggagtgcctggacaccacccagaggaagctgtacagggacgtgatgctggagaactacaacaacctggtgagcctgggctacagcggcagcaagcccgacgtgatcaccctgctggagcagggcaaggagccctgcgtggccgccagggacgtgaccggcaggcagtgccccggcctgctgagcaggcac

SEQ ID NO: 19297 - RNA, 243 nt, synthetic construct
  source 1..243: mol_type = other RNA
ctgctgcaggagagcctgaccctggaggacgtggccgtggacttcacccaggaggagtggaggctgctggcccccgcccagaaggacctgtacagggacgtgatgctggagaacttcaggaacctggtgagcgtgggctacgtggccagcatgcccgccgccctgagcaggctggagaggggcggcaggtggatgaccgaggacgagaccaggaggggcatctgccccgagatcaagaaggac

SEQ ID NO: 19298 - RNA, 243 nt, synthetic construct
  source 1..243: mol_type = other RNA
gcccaggagagcatcaccctggaggacgtggccgtggacttcacctgggaggagtggcagctgctgggcgccgcccagaaggacctgtacagggacgtgatgctggagaactacagcaacctggtggccgtgggctaccaggccagcaagcccgacgccctgttcaagctggagcagggcgagcagccctggaccatcgaggacggcatccacagcggcgcctgcagcgacatctggaaggtg

SEQ ID NO: 19299 - RNA, 243 nt, synthetic construct
  source 1..243: mol_type = other RNA
agcgacgaggccttcagcttcgaggacctgagcgtggacttcacccagaaggagtggcagctgctgaaccccggccagaaggacctgtacaaggacgtgatgctggagaactacagcagcctggtgagcctgggctacgagatcatgaagcccgacgtgatcttcaagctggagcagggcgaggagccctggatcggcgacggcgaggtgcccagcagcggctgccccgccgacatgagctac

SEQ ID NO: 19300 - RNA, 243 nt, synthetic construct
  source 1..243: mol_type = other RNA
ttccaggagcccgtgaccttcgaggacgtggccgtgtacttcacccagaacgagtgggccagcctgcaccccacccagagggccctgtacagggaggtgatgctggagaactacgccaacgtgaccagcctgagcgccttccccttccccaagcccgacctgatcttccagctggagcagggcgaggccgcctggggccccgacccctggaccctggccggcggcgaggccctgaggggcatg

SEQ ID NO: 19301 - RNA, 243 nt, synthetic construct
  source 1..243: mol_type = other RNA
gcccaggagcccgtgaccttcaacgacgtggccgtggacttcacccaggaggagtggggccagctggacctggtgcagaggaccctgtacagggacgtgatgctggagacctacggccacctgctgagcgtgggcaaccagatcaccaagcccgaggtgatcagcctgctggagcagggcgaggagccctggagcatggagcccgcctaccccctgcagggcacctgccccgcccccgagatc

SEQ ID NO: 19302 - RNA, 243 nt, synthetic construct
  source 1..243: mol_type = other RNA
cacagcgagggcaggctgaccttccaggacgtggccatcgacttcacccaggaggagtgggagtgcctggaccccggccagaggaagctgtacagggacgtgatggtggagaactacaggaacctggccagcctgggcctggtgagcaaggtggacctggtgaccttcctggagctgctgaaggaccccaggaacatcaggaggatgaagaccaccgccatctaccccgccgtgagcccccag

SEQ ID NO: 19303 - RNA, 243 nt, synthetic construct
  source 1..243: mol_type = other RNA
gagcccgtgaccttcgaggacgtggccgtgtacttcagccagaaccagtgggccagcctggacagcgcccagagggccctgtacagggaggtgatgctggagaactacgccaacgtggccagcctggtgagccccttccccaggcccgacctgatcagccagctggagaggggcgaggccccctgggaccccaacccctgggaggccgaggacctgaggggcatctgccccggcggcgagagg

SEQ ID NO: 19304 - RNA, 243 nt, synthetic construct
  source 1..243: mol_type = other RNA
gcccaggtgtgcgtgaccttcgacgacgtggccgtgaccttcacccaggaggagtggggccacctggaccccgcccagaggaccctgtaccaggaggtgatgctggagacctgcggcctgctgatgagcctgggctgccccgtgcccaggcccgagctgatctaccagctggagcacggccaggagctgtggaccgtgaagagggacctgagcggcagcacctgccccgtggacaagggcaag

SEQ ID NO: 19305 - RNA, 243 nt, synthetic construct
  source 1..243: mol_type = other RNA
atggtgagcttcgaggacgtggccgtgctgctgagccaggaggagtgggactgcctgatccccgcccagaggggcctgtacagggacgtgatgctggagacctacggcaacctggtgagcctgggcctgcaggccagcaagcccgacgtgatcagcaggctggagcagggcgacaagccctggaccccccacatcctgaggacccagatcagctggagctggaggcacaagagggagtgctac

SEQ ID NO: 19306 - RNA, 243 nt, synthetic construct
  source 1..243: mol_type = other RNA
gacgccgtgaccttccccgacgtggccatcgacttcagcagggacgagtgggagtgcctgaacctggcccagaggaccctgtacaggaaggtgatgctggagaactacaggaccctggtgagcgtgggcctgtgcgtgagcaagcccgacgtgatcagcctgctggagcagggcgaggagccctgggtgaccgacggcgagatggccggcggcctgtgcccccacagcgagtgcgtgtggatg

SEQ ID NO: 19307 - RNA, 243 nt, synthetic construct
  source 1..243: mol_type = other RNA
gcccaggagctggtgaccttccaggacgtggccgtggacttcacccaggaggagtggggcctgctggaccacccccagaaggagctgtacaaggaggtgatgctggagaacgccaggaacgccctgagcctgggcctgcccgtgcccagggagggcctgatcagccacttcggccagagggaggccccctggatgatggagctggaggaccccaggaccagctaccccgtgagccagaagctg

SEQ ID NO: 19308 - RNA, 243 nt, synthetic construct
  source 1..243: mol_type = other RNA
ggcgaggaggccgtgaccttcagggacgtggccctggacttcacctgggaggagtggggctgcctgagcgccgcccagagggagctgtacaaggacgtgatgctggagaactacaggaacctggtgagcctggccggcctgcccggccccaagcccggcctgatcagctggctggagggcgaggaggagccccacccctgggacagcctggtgcacgccgccaggagcaccagcctgagcaag

SEQ ID NO: 19309 - RNA, 243 nt, synthetic construct
  source 1..243: mol_type = other RNA
gcccaggagcccctgaccttccacgacgtggccgtggacttcacctgggaggagtggcagctgctggaccccgagcagaaggacctgtacagggacgtgatgctggagacctacagccacctggtgagcgtgggctacgaggccagcaagcccgacatcctgagcaagctggaccacggcgaggccccctggaccgtggccggcgagatccactgcggcacccacagcgagatctggaagagg

SEQ ID NO: 19310 - RNA, 243 nt, synthetic construct
  source 1..243: mol_type = other RNA
ttccaggccagcgtggtgttcgaggacgtggccgtgaagttcacccccgaggagtgggccctgctggacaggggccagaggaagctgtacagggacgtgatgctggagacctgcaggaacctgagcagcgtggagaagcagaagttccacagcaacggcgacctgaccaggatgcaggagggcctgctgaggagccccctggtggagagcgtgtgcgagaggatcgagggcgaccagtgcggc

SEQ ID NO: 19311 - RNA, 243 nt, synthetic construct
  source 1..243: mol_type = other RNA
gcccacaggagcctgatgttcagcgacgtgagcatcgtgttcagccaggaggagtgggagtacctggacctggagcagagggacctgtacagggacgtgatgctggagaactacagcaacctggtgagcctgggctgcttcatcagcaagcccgacgtgatcagcctgctggagcagggcaaggagccctggaaggtggtgaggaagggcaggaggaggtacgccgacctggagaccaggtac

SEQ ID NO: 19312 - RNA, 243 nt, synthetic construct
  source 1..243: mol_type = other RNA
ccccagaagctggtgaccttcgaggacgtggccgtgtacttcacccccaccgagtgggacggcctgagccccgcccagagggccctgtacagggacgtgatgctggagaactacggcaacgtggccagcctgggcttccccatcctgaagcccgccgtgatcagccagctggagggcggcggcgagctgggcatccccagcctgctggccgccggcgtgggcagcgacccccccggcctgtgg

SEQ ID NO: 19313 - RNA, 243 nt, synthetic construct
  source 1..243: mol_type = other RNA
agcctgggccccgtgagcttcaaggacgtggccgtgggcttcacccaggaggagtggaggcagctggagcccgcccagaggaggacctacagggaggtgatgctggagaactacagccacctggtggccgtgggctgccacttcatcaagcccgacgtgatcaccaagctggagaggggcgaggagccctggatcgagggcggcttcctgccccagggctgcgccgacgaggtgtggcaggcc

SEQ ID NO: 19314 - RNA, 243 nt, synthetic construct
  source 1..243: mol_type = other RNA
agccagagcctggtgaccttcggcgacgtggccgtggacttcagccaggaggagtgggagcagctgacctgcgcccagagggccctgtacagggacgtgatgctggagaactacaggaacctggtgagcctgggcctgtgcttcagcaagcccgacatgatcagcagcctggagcagagggaggagccctggatggccaagaggaagctgaccaggggcccctgccccgactggagggccgtg

SEQ ID NO: 19315 - RNA, 243 nt, synthetic construct
  source 1..243: mol_type = other RNA
gtgaaggagagcgtgaccttcaaggacgtggccatcgacttcaccctggaggagtggaggctgatggaccccacccagaggaacctgcacaaggacgtgatgctggagaactacaggaacctggtgagcctgggcctggccgtgagcaagcccgacatgatcagccacctggagaacggcaagggcccctggcccaagcccgccaccaagaacgccaccaggaccaaggacatcagcgaggac

SEQ ID NO: 19316 - RNA, 243 nt, synthetic construct
  source 1..243: mol_type = other RNA
tggcaggagagcctgaccttcaaggacgtggccgtggacttcacccaggaggagtggggcctgctggaccacagccagaagaggctgtacaaggaggtgatgctggagaacagccagaacctgctgagcctgggcatcccccccctgagggaggacctgatcagccacctggaggagggcgaggccagctggatcctggacaggaagggccccaggaagagctgccccgacgccgagaccagg

SEQ ID NO: 19317 - RNA, 243 nt, synthetic construct
  source 1..243: mol_type = other RNA
gaggagctgcccgtggtgttcgaggacgtggccgtgtacttcaccagggaggagtgggccatgctggacaagaggcagaaggagctgtacagggacgtgatgaggatgaactacgagctgctggccagcctgggccccgccgccgccaagcccgagctgatcagcaagctggagaggagggccgccccctggatcaaggaccccaacggccccaagtggggcaagggcaggccccccggcaag

SEQ ID NO: 19318 - RNA, 243 nt, synthetic construct
  source 1..243: mol_type = other RNA
gtgcacggcagcgtgaccttcagggacgtggccatcgacttcagccaggaggagtgggagtgcctgcagcccgcccagaagaccctgtacagggacgtgatgctggagaactacagccacctgatcagcctgggcagcagcatcagcaagcccgacgtgatcaccctgctggagcaggagaaggagccctggatggtgaggaggaaggagaccaacaggtggtaccccgacctggagagcaag

SEQ ID NO: 19319 - RNA, 243 nt, synthetic construct
  source 1..243: mol_type = other RNA
tgctaccaggacagcgtgaccttcgacgacgtggccgtggacttcacccaggaggagtggaccctgctggaccccacccagaggagcctgtacagcgacgtgatgctggagaactacaagaacctggccaccgtgggcggccagatcatcaagcccagcctgatcagctggctggagcaggaggagagcaggaccgtgaggggcggcgtgctgcagggcaggaagacccagtggaggggcacc

SEQ ID NO: 19320 - RNA, 243 nt, synthetic construct
  source 1..243: mol_type = other RNA
ttccagggcagcgtgagcttcgaggacgtgaccgtgggcttcagccaggaggagtggcagcacctggaccccagccagagggccctgtacagggacgtgatgctggagaactacagcaacctggtgagcgtgggctactgcgtgcacaagcccgaggtgatcttcaggctggagcagggcgaggagccctggaggctggaggaggagttccccagccagagcttccccgaggtgtggaccgcc

SEQ ID NO: 19321 - RNA, 243 nt, synthetic construct
  source 1..243: mol_type = other RNA
gcccaggagagcgtgaccttcgaggacgtggccgtgaacttcaccaacagggagtggcagagcctgacctacgcccagaggcacctgtacaagcacgtgatgctggagaactacggcaacatggtgagcctgggcttccccttccccaagccccccctgatcagccacctggagaggggcgtggagccctgcgtgcaggacccccaggacagggagagcctgagctgcagctaccccgtgagc

SEQ ID NO: 19322 - RNA, 243 nt, synthetic construct
  source 1..243: mol_type = other RNA
gtgggccaccccgtgaccttcagggacgtggccgtggacttcagcctggaggagtggaggtgcctgagccccgcccagagggccctgtacagggacgtgatgctggagaactacgagaacctggtgagcgtgggcctgcccgtgagcaagcccaccgtgatcagcctgctggagaagggcgaggccccctggatgccccaggccggcgcccccaggggcccctgccccgactacctgagctgg

SEQ ID NO: 19323 - RNA, 243 nt, synthetic construct
  source 1..243: mol_type = other RNA
gcccaggagctggtgaccttccaggacgtggccgtggacttcaccgaggaggagtggggcctgctggaccacagccagaaggagctgtacaaggaggtgatgctggagaacgcccagaacctgctgagcctgggcctgcccgtgaccagggaggacctgatcagcttcttccagaagggcgaggccccctggatcctggagcccaagggcccctggaacttctgccccgacgccgtgaccagg

SEQ ID NO: 19324 - RNA, 243 nt, synthetic construct
  source 1..243: mol_type = other RNA
agccagagcctggtggagttcggcgacgtggccatcgacttcagccaggaggagtgggagtggctgaaccccgcccagaggaccctgtacaggaaggtgatgctggagaactacaggaacctggccagcctgggcctgtgcggcagcaagcccgccgtgatcagcagcctggagcagggcaaggagccctgggccgtgaagaggaaggtggccaggggctggagccccgacctgaagaccgtg

SEQ ID NO: 19325 - RNA, 243 nt, synthetic construct
  source 1..243: mol_type = other RNA
gcccccgtgaccttcggcgacctggccatctacttcagccaggaggagtgggagtggctgagccccatccagaaggacctgtacgaggacgtgatgctggagaactaccagaacctggtgagcctgggcctgtgcttcaggaggcccaacgtgatcaccctgctggagaggggcaaggccccctggatggtggaccccgtgaagaggaggaggggcctggacctgggcagcaagggcgagacc

SEQ ID NO: 19326 - RNA, 243 nt, synthetic construct
  source 1..243: mol_type = other RNA
gacaccgtggtgttcgaggacgtggtggtgggcttcaccctggaggagtgggccctgctgaaccccgcccagaggaacctgtacagggaggtgatgctggagaccttcaagcacctggccagcgtggacaacgaggcccagcccaagaccaacggcagcatcagccagcaggacaccagcggcgagaagctgagcctgaagcagaagatcgagaagttcaccaggaagcacacctgggccagc

SEQ ID NO: 19327 - RNA, 243 nt, synthetic construct
  source 1..243: mol_type = other RNA
atggccttcgaggacgtggccgtgtacttcagccaggaggagtggggcctgctggacaccgcccagagggccctgtacaggcacgtgatgctggagaacttcaccctggtgaccagcctgggcctgagcaccagcaggccccacgtggtgatccagctggagaggggcgaggagccctgggtgcccagcggcaaggacatgaccctggccaggaacacctacaggaggctgaacgccggcgag

SEQ ID NO: 19328 - RNA, 243 nt, synthetic construct
  source 1..243: mol_type = other RNA
aggcccgagagcgtgaccttcgaggacgtggccgtgtacttcagcgagaacgagtggatcggcctgggccccgcccagagggccctgtacagggacgtgatgctggagaactacggcgccgtggccagcctggccttccccttccccaagcccgccctgatcagccagctggagaggggcgaggccccctggtgcagcgtgccctggggcgccctggacggcgaggaccccaggagcatcagc

SEQ ID NO: 19329 - RNA, 243 nt, synthetic construct
  source 1..243: mol_type = other RNA
ctgcaggtgagcgtgagcttcgaggacgtgaccgtgaacttcagcagggaggagtggcagcacctggaccccgcccagaggaggctgtacagggacgtgaccctggagaactacagccacctgaggagcgtgggctaccaggtgcccaagcccgaggtgatcttcaagctggagcagggcgagggcccctggaccctggagggcgagaccccccaccagagctgcagcggcgaggacatcggc

SEQ ID NO: 19330 - RNA, 243 nt, synthetic construct
  source 1..243: mol_type = other RNA
tgctggggcctgctgagcttcaaggacatcagcatggacttcacctgggaggagtggcagctgctggacagcgcccagaagtacctgtacagggacgtgatcctggagaactacaggaacctggtgagcgtgggctaccacggcaccaagcccgacctgatcttcaagctggagcagggcgaggagccctggatcaggaacgccaagatcagcaggcccaggtgcagcgagggctggaaggag

SEQ ID NO: 19331 - RNA, 243 nt, synthetic construct
  source 1..243: mol_type = other RNA
ctgcagggcagcgtgaccttccaggacgtggccgtggacttcagctgggaggagtggggccacctgggccccgcccagaaggagctgtacagggaggtgatgctggagaactacggcaacctggtgtgcctgggcctggccgtgagcagccccgacgtggtgtgccagctggagaggggcgagggcccctggatgcccgagggcgacgtgcccggcagcagctgcgccggctgggagaccaag

SEQ ID NO: 19332 - RNA, 243 nt, synthetic construct
  source 1..243: mol_type = other RNA
ccccagggcctggtgaccttcggcgacgtggccgtggacttcagccaggaggagtgggagtggctgaaccccaaccagaggaacctgtacaggaaggtgatgctggagaactacaagaacctggccagcctgggcctgtgcgtgagcaagcccgacgtgatcagcagcctggagcagggcaaggagccctggaccgtgaagaggaagatgaccagggcctggtgccccgacctgaagatcgtg

SEQ ID NO: 19333 - RNA, 243 nt, synthetic construct
  source 1..243: mol_type = other RNA
cccctggagctggtgaccttcaaggacgtggccgtggacttcagctgggaggagtggggccacctggagcccagccagaaggagctgtacagggaggtgatgctggagaactacaggaacctggtgtgcctgggcctggccatcagcaagcccgacgtgatcttccagctggagcagggcgaggccccctggatgcccgagagggagggccccaagtgcaggtgcgccgactggaagaccagg

SEQ ID NO: 19334 - RNA, 243 nt, synthetic construct
  source 1..243: mol_type = other RNA
ccccagaagagcgtgaccttcgaggacgtggccgtgtacttcacccccaccgagtgggacggcctgagccccgcccagagggccctgtacagggacgtgatgctggagaactacggcaacgtggccagcctgggcttccccctgatcaagcccgccgtgatcctgcagctggagggcggcggcgagctgggcggccccagccccctggccgccgagaccggcaccgacccccccggcctgtgg

SEQ ID NO: 19335 - RNA, 243 nt, synthetic construct
  source 1..243: mol_type = other RNA
gccaagggcctgctgaccttcggcgacgtggccatcgagttcagccaggaggagtgggagtgcctgagccacacccagagggagctgtacagggacgtgatcctggagaactacggccacctgctgttcctgggcgtgatcgtgagcaagcccgacctggtgagcctgctggagcagaggaaggagccctggggcgagaagaggaacaagaccaggatccacgtgggcaagaaccccttcggc

SEQ ID NO: 19336 - RNA, 243 nt, synthetic construct
  source 1..243: mol_type = other RNA
caggccgaggtgaccttcgaggacgtggccgtgctgttcagcagggaggagtggggcaggctgggccccgcccagaggggcctgtacagggacgtgatgctggagacctacaggaacctggtgagcctgggcgccggccccgccggccccaagcccggcgtgatcacccagctggagaggggcgacgagccctgggtgctggacacccagggcgccaagggcaaggagaggctgagggtgagc

SEQ ID NO: 19337 - RNA, 243 nt, synthetic construct
  source 1..243: mol_type = other RNA
ccccagaagctggtgaccttcgaggacgtggccgtgtacttcacccaggccgagtgggacggcctgagccccgcccagaggatcctgtacagggacgtgatgctggagaactacggcaacgtggccagcctgggcttccccctgctgaagcccgccgtgatcagccagctggagggcggcggcgagctgggcgcccccagccccctggccgccggcaccggcctgcacggcctgaggaccgtg

SEQ ID NO: 19338 - RNA, 243 nt, synthetic construct
  source 1..243: mol_type = other RNA
cagggcctgctgaccttcggcgacgtggccatcgagttcagccaggaggagtggaggtgcctgagccacacccagagggagctgtacagggacgtgatgctggagaactacggccacctgctgttcctgggcctgatcgtgagcaagcccgacctggtgagcctgctggagcagaggaaggagccctgggacgtgaagaggaagaagaccgtggtgttcgaccccgccgtgagcagccacggc

SEQ ID NO: 19339 - RNA, 243 nt, synthetic construct
  source 1..243: mol_type = other RNA
ggcaaggagctgctgagcttcgaggacgtggccatgtacttcaccagggaggagtggggcaggctggactggggccagaaggacctgtacagggacgtgatgctggagaactacaggaacatggtgctgctgggcttccagttccccaagcccgaggtgatctgccagctggagaactgggacgagcagtggatcctggacctgcccagggccggcagcaggaaggccagcggcagcgcctgc

SEQ ID NO: 19340 - RNA, 243 nt, synthetic construct
  source 1..243: mol_type = other RNA
caccaggagatggtgaccttcgaggacgtggccgtgcacttcaccaagaccgagtggaccggcctgagccccgcccagagggccctgtacaggagcgtgatgctggagaacttcggcaacctgaccgccctgggctaccccgtgcccaagcccgccctgatcagcctgctggagggcggcgacatggcctggggcctggaggcccaggacgacgcccccgccgagaggaccaagaacatctgc

SEQ ID NO: 19341 - RNA, 243 nt, synthetic construct
  source 1..243: mol_type = other RNA
agccagatccccctgaccttccaggacgtggccgtggacttcacctgggaggagtggggcctgctggagcccagccagaaggacatgtactgggacgtgatgctggagaactacgagaacttcgtgagcctgggcggcatccccgtgagcttccccgacgtgatcagccagatggagaggatcgaggccccctggatgaccgagaggggcgtgctggtgagcgccttcctggacagccccaac

SEQ ID NO: 19342 - RNA, 243 nt, synthetic construct
  source 1..243: mol_type = other RNA
aagcccggcgccgtgagcttcgccgacgtggccgtgtacttcagccccgaggagtggggctgcctgaggcccgcccagagggccctgtacagggacgtgatgagggagacctacggccacctgggcgccctgggcttccccggccccaagcccgccctgatcagctggatggagcaggagagcgaggcctggagcagcgccgcccaggaccccgagaagggcgagagcctgggcggcgccagg

SEQ ID NO: 19343 - RNA, 243 nt, synthetic construct
  source 1..243: mol_type = other RNA
gaggccctgcccgtggtgttcgaggacgtggccgtgtacttcaccagggaggagtggggcatgctggacaagaggcagaaggagctgtacagggacgtgatgaggatgaactacgagctgctggccagcctgggccccgccgccgccaagcccgacctgatcagcaagctggagaggaggaccgccccctggatcaaggaccccaacggccccaagctgggcaagggctgcccccccggcaag

SEQ ID NO: 19344 - RNA, 243 nt, synthetic construct
  source 1..243: mol_type = other RNA
ctgcaggtgagcgtgagcttcgaggacgtgaccgtggacttcagcagggaggagtggcagcacctggaccccgcccagaggaggctgtactgggacgtgaccctggagaactacagccacctgctgagcgtgggctaccaggtgcccaagcccgaggtgatcctgaagctggagcagggcgagggcccctggaccctggagggcgagaccccccaccagagctgcagcgacgaggacatcggc

SEQ ID NO: 19345 - RNA, 243 nt, synthetic construct
  source 1..243: mol_type = other RNA
atgaccttcgaggacgtgagcgtggagttcacccagggcgagtggggccagctgaaccccgcccagaaggacctgtacagggaggtgatgctggagaacttcaggaacctggccttcctgggcctgcccgtgagcaagccctacgtgatctgccagctggaggagggcggcgagcccttcatcgtggagagggaggtgagcaccggcgcctacagcgactgggagaggaggagcaagagcaag

SEQ ID NO: 19346 - RNA, 243 nt, synthetic construct
  source 1..243: mol_type = other RNA
ccccaggccagcgtgaccttcgaggacgtggccgtgtacctgacccaggaggagtggggccacctggagcccgcccagaggggcctgtacagggacgtgatgctggagaactacggcaacgtggtgagcctgggcttccccgtgagcaagcccgacgtgatcctgcagctggagctgaggggcgagccctggttcctggacatgcagggcaccgagggcagggagatcctgagggactgcgag

SEQ ID NO: 19347 - RNA, 243 nt, synthetic construct
  source 1..243: mol_type = other RNA
cagcagggcagcgtgaccttcagggacgtggccgtggacttcaccctggaggagtggggccacctggaccccttccagaaggagctgtacagggacgtgatgctggagaacttcaggaacctggtgtgcctgggcctgaccgtgagcaagcccgacgtgatccaccagctggagcagggcgaggccccctggatccccgagggcgagagccccaggaacagcttcgccggctgcgccagcgac

SEQ ID NO: 19348 - RNA, 243 nt, synthetic construct
  source 1..243: mol_type = other RNA
gtgaagttcgccgacgtggccgtgtacttcagccccgaggagtggggctgcctgaggcccgcccagagggccctgtacagggacgtgatgagggagaactacggccacctgggcgccctgggctgcgccggccccaagcccgccctgatcagctggctggagaggaacaccgaggactgggagcccgccgccctggacccccaggactgccccaggggcctgatggtgcagaggaagtggccc

SEQ ID NO: 19349 - RNA, 243 nt, synthetic construct
  source 1..243: mol_type = other RNA
ttccagggcagcgtgaccttcgaggacgtggccatcgccttcagccagcaggagtgggagagcctggacagcagccagaggggcctgtacagggacgtgatgctggagaactacaggaacctggtgagcatggccggccacagcctgagcaagccccacgtgatcgccctgctggagaggtggaaggagcccaaggtgaccgagaggaaggacggcaggaggtggtgcaccgacctgcagctg

SEQ ID NO: 19350 - RNA, 243 nt, synthetic construct
  source 1..243: mol_type = other RNA
ccccaggagagcgtgaccttcagggacgtggccgtggacttcacctgggaggagtggggccagctggaccccagccagaaggagctgtacagggaggtgatgctggagaactacggcaacctggcctgcctgggcctggccgtgagcaagcccgacgtgatcctgcagctggagaggggcgagatcccctggatgagcgagaggaaggtgcccgagggcatctgccccgactgggaggccagg

SEQ ID NO: 19351 - RNA, 243 nt, synthetic construct
  source 1..243: mol_type = other RNA
ctgagggagagcgtgaccttcaaggacgtggccgtggacttcaccggcgaggagtggaggaggctggaccccgcccagagggccctgtacagggacgtgatgctggagaactacgagaacctggtgagcctgggcctgcccgtgagcaagctggacgtgatcagcctgctggagaggggcgaggccccctggtggctggagggcggcggcctgcagagcccctgcagcgacgccctgagccag

SEQ ID NO: 19352 - RNA, 243 nt, synthetic construct
  source 1..243: mol_type = other RNA
caggccgaggtgaccttcgaggacgtggccgtgctgttcagcagggaggagtggggcaggctgggccccacccagaggggcctgtacagggacgtgatgctggagacctacaggaacctggtgagcctgggcgccggcagggccggccccaagcccggcgtgatcacccagctggagaggggcgacgagccctgggtgctggacgcccagggcgccaagggcaagggcaggcccagggtgagc

SEQ ID NO: 19353 - RNA, 243 nt, synthetic construct
  source 1..243: mol_type = other RNA
agccccgagagcgtggccttcgaggacgtggccgtgtacttcaccaagaaggagtgggccagcctgctgcccgcccagagggccctgtacaaggaggtgatgctggagaactacggcatggtggccagcctggcccccccccccatcagcaagcccgccctgatcagccagctggagcagggcaaggagccctggttcaccaggccccagggcgccctgaacaggagggccaggagggtggtg

SEQ ID NO: 19354 - RNA, 243 nt, synthetic construct
  source 1..243: mol_type = other RNA
agcaggaagcccgtgagcttcgccgacgtggccgtgtacttcagccccgaggagtggggctgcctgaggcccgtgcagagggccctgtacagggacgtgatgagggagacctacggccacctgggcgccctgggcttccaggacaccaagcccgccctgatcagctggatggaggaggaggccgagctgtggggcagcgacgccagggaccccgagctgggcgagtgcctgagcgaggacacc

SEQ ID NO: 19355 - RNA, 243 nt, synthetic construct
  source 1..243: mol_type = other RNA
aagcccaggaccgtgagcttcgccgacgtggccgtgtacttcagcagggaggagtggggctgcctgaggcccgcccagagggccctgtacagggacgtgatgagggagacctacggccacctgggcgccctgggcttccccggccccaagcccgccctgatcagctggatggagcaggagaccgaggcctggagccccgccgcccaggaccccgagaagggcgagaggctgggcggcgccagg

SEQ ID NO: 19356 - RNA, 243 nt, synthetic construct
  source 1..243: mol_type = other RNA
tgcaaggagagcgtgaccttcaaggacgtggccgtggagttcacctgggaggagtgggtgcacctgaacagcagccagaagaccctgtacagggacgtgatgctggagaactacaggaacctggtgagcctgggcttcgccgtgagcaagcccgacgtgatctaccagctggagaggaaggaggccagctggatccccggcgccgacatccccaggagcagctgccccgagagcaaggagttc

SEQ ID NO: 19357 - RNA, 243 nt, synthetic construct
  source 1..243: mol_type = other RNA
ttccagggcagcgtgaccttcagggacgtggccatcgacttcagccaggaggagtgggcctggctgcagcccgcccagagggacctgtacaggcacgtgatgctggagaactacggccacctggtgagcctgggcctgaacatcagcaagcccgacgtggtgagcctgctggagcagggcaaggagccctggctgggcaagggcgacgtgaggaccgacttcttccccgtgagcgagagcaac

SEQ ID NO: 19358 - RNA, 243 nt, synthetic construct
  source 1..243: mol_type = other RNA
agccaggacctggtgaccttcaaggacgtggccatcgacttcagccaggaggagtggcagtggatgaaccccgcccagaagaggctgtacaggagcatgatgctggagaactaccagagcctggtgagcctgggcctgtgcgtgagcaagccctacgtgatcagcctgctggagcagggcagggagccctgggagatgaccagcgagatgaccaggagccccttcagcgactgggagagcatc

SEQ ID NO: 19359 - RNA, 243 nt, synthetic construct
  source 1..243: mol_type = other RNA
caggagcccgtgaccttcgaggacgtggccgtgtacttcacccagaaccagtgggccaagctggaccccacccagagggccctgtacagggaggtgatgctggagaactacgccaacgtggccagcctgggcgtggccttccccttccccaagcccgacctggtgagccagctggagaggggcgaggtgccctggggccccgacccctgggaggccgaggtgctgaggggcatctgccccggc

SEQ ID NO: 19360 - RNA, 243 nt, synthetic construct
  source 1..243: mol_type = other RNA
ttccagggcagcatcagcttcaaggacgtgaccgtgggcttcacccaggaggagtggcagcacctggaccccagccagagggccctgtacagggacgtgaccctggagaactacagcaacctggtgagcgtgggctactgcgtgcacaagcccgaggtgatcttcaggctggagcagggcgaggagccctggaggctggaggaggagttccccagccagagcttccccgaggtgtggaccgcc

SEQ ID NO: 19361 - RNA, 243 nt, synthetic construct
  source 1..243: mol_type = other RNA
ccccaggagcccgtgaccttcaaggacgtggccgtggacttcagccaggaggagtggggcctgctgggccccgcccagaggcacctgtacagggacgtgatgctggagaactacaggaacctggtgagcctgggcctgatcctggccaagcccgaggtggtgtgccacctggagcagggcggcgagctgtggaagcccgagcacggcgtgctgtgcagcggcgacggcgagctgtgggtgagg

SEQ ID NO: 19362 - RNA, 243 nt, synthetic construct
  source 1..243: mol_type = other RNA
ccccaggagcccgtgaccttcgaggacgtggccgtgctgttcacccccgaggagtggatgttcctggacagcgcccagaggagcctgtacagggacgtgatgctggagaactacaggaacctggccagcgtgggcgaccagctgggcaagttcagcagcttcagccacctggagcagggcgaggagtggtggcccaccgagaggagggtgttccccggcagctgccccgagcccagcctgccc

SEQ ID NO: 19363 - RNA, 243 nt, synthetic construct
  source 1..243: mol_type = other RNA
agccagggcagcgtgaccttcagggacgtggccatcgacttcagccaggaggagtggaagtggctgcagcccgcccagagggacctgtacaggtgcgtgatgctggagaactacggccacctggtgagcctgggcctgagcatcagcaagcccgacgtggtgagcctgctggagcagggcaaggagccctggctgggcaagaggaacgtgaacagggacctgttcagcgtgagcgagagcagc

SEQ ID NO: 19364 - RNA, 243 nt, synthetic construct
  source 1..243: mol_type = other RNA
cagcagggcagcgtgaccttccaggacgtggccgtggacttcagctgggaggagtggggccacctgggccccacccagaaggagctgtacagggaggtgatgctggagaactacggcaacctggtgtgcctgggcctggccgtgagcagccccgacgtggtgtgccagctggagaggggcgagggcccctggatgcccgagggcgacgcccccggcagcagcagggccggcagcagcaagcac

SEQ ID NO: 19365 - RNA, 243 nt, synthetic construct
  source 1..243: mol_type = other RNA
acccaggacagcgtgaccttcaaggacgtggccgtggacttcaccagggaggagtgggagaggctgaacagcacccagagggacctgtacagggacgtgatgctggagaactacaggaacctggtgagcctgggcctggccgtgagcaagcccgacatcatcttccagctggagcaggagaaggagctgtggatgctgaagaggaaggtgctgaggagcaccaggcccgcccagaagaccgag

SEQ ID NO: 19366 - RNA, 243 nt, synthetic construct
  source 1..243: mol_type = other RNA
aggcccggcgccgtgagcttcgccgacgtggccgtgtacttcagccccgaggagtgggagtgcctgaggcccgcccagagggccctgtacagggacgtgatgagggagaccttcggccacctgggcgccctgggcttcagcggccccaagcccgccttcatcagctgggtggagggcgaggtggaggcctggagccccgagagccaggaccccgacggcgagagcagcgccgccttcagcagg

SEQ ID NO: 19367 - RNA, 243 nt, synthetic construct
  source 1..243: mol_type = other RNA
ctgcagggcctgctgaccttcagggacgtggccatcgagttcagccaggaggagtggggctgcctgagccacacccagagggagctgtacagggacgtgatgctggagaactacggccacctgctgttcagcggcctgatcgccagcaagcccgacctggtgagctgcctggagcagaagaaggagccctgggacctgaagaggaagaagaccgtggccatccaccccgtgtacgagctgaag

SEQ ID NO: 19368 - RNA, 243 nt, synthetic construct
  source 1..243: mol_type = other RNA
aggcagggcagcgtgaccttccaggacgtggccgtggacttcagctgggaggagtggggcaggctgggccccacccagaaggagctgtacagggaggtgatgctggagaactacaggaacctggtgtgcctgggcctggaggtgagcaagcccgacgtggtgtaccagctggagaggggcgaggccccctggatgcccgagggcgccgtgaggaggagctgcagccagaactggggcgccagg

SEQ ID NO: 19369 - RNA, 243 nt, synthetic construct
  source 1..243: mol_type = other RNA
agcgccgccagcgtgaccttcagggacgtggccgtggacttcagcagggaggagtggagcaggctggacgccgcccagagggccctgtacagggacgtgatgtgggagacctacgagaacctggtgagcaccggcatccccgtgagcaggctggacgtgatcagcctgctggccaagcaggaggcccagtggacccccgaggaggtgcccggctggaccagccccgacagcttcagcgaggag

SEQ ID NO: 19370 - RNA, 243 nt, synthetic construct
  source 1..243: mol_type = other RNA
agctgggccagcgtggtgttcgaggacgtggccgtgaacttcacccccgaggagtgggccctgctgaacaggggccagaggaagctgtacagggacgtgatgctggagacctgcaggaacctgagcgccgtggagaagaggaagttccacagcagcggcgacctgaccaggatgcaggagggcctgctgaggagccccctggtggagagcgtgtgcgagaggatcgagggcgacccctgcggc

SEQ ID NO: 19371 - RNA, 243 nt, synthetic construct
  source 1..243: mol_type = other RNA
gcccacggcctggtgatgttcaaggacgtggccatcgacgtgagccaggaggagtgggagtgcctgaaccccacccagaggagcctgtacaaggacgtgatgctggagaactacagcaacctggtgagcctgggcctgagcatcagcaagcccgccgtgatcagcagcctggagcagggcaaggagccctggatggtggtgagggaggtgaccggcgagcagtgccccgacctggtgagcagg

SEQ ID NO: 19372 - RNA, 243 nt, synthetic construct
  source 1..243: mol_type = other RNA
agctacgagggcagcgtgagcttcagggacgtggccatcaacttcagcagggaggagtggcagcacctggacctgagccagaggaacctgtacagggacgtgatgctggagacctgcagccacctgctgagcgtgggctaccaggtgcccaagcccgaggtggtgatgctggagcagggcaaggagccctgggccctgcagggcgagaggcccaggcagagctgccccggcgagaagctgtgg

SEQ ID NO: 19373 - RNA, 243 nt, synthetic construct
  source 1..243: mol_type = other RNA
ggcgaggaggccgtgaccttcagggacgtggccctggacttcacctgggaggagtggggctgcctgagcgccgcccagagggagctgtacaaggacgtgatgctggagaactacaggaacctggtgagcctgggcctgcccggccccaagcccggcctgatcagctggctggagggcgaggaggagccccacccctgggacagcctggtgcacgccgccaggagcaccagcctgagcaaggcc

SEQ ID NO: 19374 - RNA, 243 nt, synthetic construct
  source 1..243: mol_type = other RNA
caccagggcagcgtgaccttcggcgacgtggccgtggacttcagccaggacgagtggggccacctggaccccgcccagaaggagctgtacagggaggtgatgctggagaactacggcaacctggtgtgcctgggcctggccgtgagcaggccccacgtgatcgagcagctggagaggggcgaggccccctggctgcccaggggcgccgtgcccaggagctgcgacctggactggatgaccagg

SEQ ID NO: 19375 - RNA, 243 nt, synthetic construct
  source 1..243: mol_type = other RNA
caggccagcgtgaccttcagggacgtggccgtggacttcaccggcgaggagtggaggtgcctggagcccgcccagagggccctgtacagggacgtgatgctggagacctacgagaacctggtgttcctgggcctgagcgtgcccatcagcaagctggacctgatcttcctgctggagaggggcggcgccctgagcaggcccatgggcagggtgcccagcgacagctgccccgacagcttcatc

SEQ ID NO: 19376 - RNA, 243 nt, synthetic construct
  source 1..243: mol_type = other RNA
caggcccaggaggtgctgatgttcgacgacgtggccgtgaggttcacctgggaggagtggcagctgctgaaccccgcccagaaggccctgtacagggacgtgatgctggagaactacaggagcctggtgagcgtgggctggagggccagcaagcccgacctgctgagccagctggagaggggcgagccctggaccatcgagggcgagaaccactgcggcaccccccccgagatctggaaggcc

SEQ ID NO: 19377 - RNA, 243 nt, synthetic construct
  source 1..243: mol_type = other RNA
aggcccggcgccgtgagcttcgccgacgtggccgtgtacttcagccccgaggagtggggctgcctgaggcccgcccagagggccctgtacagggacgtgatgagggagacctacggccacctgggcgccctgggcttcgccggccccaagcccgccctgatcagctggctggagaggaagaaggaggtgtggagccccgaggccgaggaccccgaggagggcgccaggcaccccggcagcggc

SEQ ID NO: 19378 - RNA, 243 nt, synthetic construct
  source 1..243: mol_type = other RNA
gcccaggagagcgtgatgttcagcgacgtgagcatcgacttcagccaggaggagtgggagtgcctgaacgacgaccagagggacctgtacagggacgtgatgctggagaactacagcaacctggtgagcatgggccacagcatcagcaagcccaacgtgatcagctacctggagcagggcaaggagccctggctggtggacagggagctgaccaggggccagtggcccgtgctggagagcagg

SEQ ID NO: 19379 - RNA, 243 nt, synthetic construct
  source 1..243: mol_type = other RNA
agccaggagagcctgaccttcaaggacgtggccgtggacttcacccccgaggagtggggccagctgtaccccgcccagagggacctgtacagggaggtgatgctggagaactacaggaacctggtgagcctgggccaccaggtgagcaagccccacctgatcagccagctggagcagaggaaggagccctggatgatggagaggaagatccccaggggcaacttccccgactgggagaccagg

SEQ ID NO: 19380 - RNA, 243 nt, synthetic construct
  source 1..243: mol_type = other RNA
agccagggcctggtgaccttcggcgacgtggccatcgacttcagccaggaggagtgggagtggctgagccccatccagaggaacctgtacaggaaggtgatgctggagaactacaggaacctggccagcctgggcctgtgcgtgagcaagcccgacgtgatcagcctgctggagcagggcaaggagccctggaccgtgaagaggaggatgaccagggccggctgccccgacctgaaggccgtg

SEQ ID NO: 19381 - RNA, 243 nt, synthetic construct
  source 1..243: mol_type = other RNA
gcccaggagagcgtgaccttcgaggacgtggccgtgaacttcaccgacagggagtggcagtgcctgacctacgcccagaggcacctgtacaaggacgtgatgctggagaactacggcaacatggtgagcgtgggcttcctgttccccaagccccccctgatcagccacctggagaggggcgtggagccctgcgtgcaggacccccaggacagggagagcctgagctgcagctgcctggtgagc

SEQ ID NO: 19382 - RNA, 243 nt, synthetic construct
  source 1..243: mol_type = other RNA
aagcccggcgccctgagcttcgccgacgtggccgtgtacttcagcagcgaggagtggggctgcctgaggcccgcccagagggccctgtacagggacgtgatgagggagacctacggccacctgggcgccctgggcttcgccggccccaagcccgccctgatcagctggatggagaggaagaaggaggcctggagccccgaggccgaggaccccgaggacagggccagcaggatcagggccaag

SEQ ID NO: 19383 - RNA, 243 nt, synthetic construct
  source 1..243: mol_type = other RNA
agccagccccccgtgagcttcaaggacgtggtggtgagcttcaccagggaggagtggggccagctggacaccgtgcagaggaccctgtacagggacgtgaccctggagacctgcggccacctggtgagcctgggcctgctgctgcccaacctggacgtgatcagccacctggagaacggcgaggacccctggagggccgagcaggagccccccacccaggactggaagaccaccctggagaag

SEQ ID NO: 19384 - RNA, 243 nt, synthetic construct
  source 1..243: mol_type = other RNA
ccccaggagagcgtgaccttcgaggacgtggccgtggacttcacctgggaggagtggggctacctggacaccagccagaaggagctgtactgggaggtgatgctggagaactacaagaacctggtgagcctgggcttcgtggtggccaagcccgacgccatcagccagctggagcaggaggaggccccctggaggcccgaggtgctgttccccaggagcagctgcagcgacctggacaccaag

SEQ ID NO: 19385 - RNA, 243 nt, synthetic construct
  source 1..243: mol_type = other RNA
caggaggaccccgtgaccttccaggacgtggccgtggtgttcacccaggagcagtggggctacctggaccccagccagaaggagctgtacagggacgtgatgctggagaactaccagaacctgctgtgcctgggcctggccgtgagcaagcccgaggtgatctgccagctggagcagggcgaggccccctggaggcccgagggcagggtgcccggcagcagccaccccgacggcgaggtgagg

SEQ ID NO: 19386 - RNA, 243 nt, synthetic construct
  source 1..243: mol_type = other RNA
agccaggagctgctgaccttcaaggacatcagcatcgacttcacccaggaggagtggggccagctgacccccgcccaccagaacctgtacagggaggtgatgctggagaactacagcaacctggtgagcgtggccggctaccagctgagcaagcccgtggtgatcagccagctggagaagggcgaggagccctggatgaccgagaaggagggccccggcgaccccagcagcgacctgaagagc

SEQ ID NO: 19387 - RNA, 243 nt, synthetic construct
  source 1..243: mol_type = other RNA
aagcccaggaccgtgagcttcgccgacgtggccgtgtacttcagcagggaggagtggggctgcctgaggcccgcccagagggccctgtacagggacgtgatgagggagacctacggccacctgggcgccctgggcgtgggcggcagcaagcccgccctgatcagctgggtggaggaggaggccgagctgtgggaccccgccgcccaggaccccgaggtgaccaagtgccccaccgagaccgac

SEQ ID NO: 19388 - RNA, 243 nt, synthetic construct
  source 1..243: mol_type = other RNA
aggcccgagagcgtgaccttcgaggacgtggccgtgtacttcagcgagaacgagtggatcggcctggcccccgcccagagggtgctgtacagggacgtgatgctggagaactacggcgtggtggccagcctggccttccccttccccaagcccgccctgatcagccagctggagaggggcgaggccccctggtgcaaggccccccagggcgccctggacggcgagtgccccaggggcgtgagc

SEQ ID NO: 19389 - RNA, 243 nt, synthetic construct
  source 1..243: mol_type = other RNA
aagcccggcgccgtgagcttcgccgacgtggccgtgtacttcagccccgaggagtggggctgcctgaggcccgcccagagggccctgtacagggacgtgatgagggagacctacggccacctgggcgccctgggcttccccggccccaagcccgccctgatcagctggatggagcaggagaccgaggcctggagccccgccgcccaggaccccgagaagggcgagaggctgggcggcgccagg

SEQ ID NO: 19390 - RNA, 243 nt, synthetic construct
  source 1..243: mol_type = other RNA
ccccaggaggccgtgaccttcaaggacgtggtggtggacttcacccaggaggagtggaagtgcctggacagcagccagaaggagttctacagggacgtgatgctggagaactacagcaacctggtgagcctgggcctggccttccccaagccctacgtgatcgaccagctggagaggagggaggccccctggatccccgagggcgacatccccaggatcagccaccccgagaggaagaagaag

SEQ ID NO: 19391 - RNA, 243 nt, synthetic construct
  source 1..243: mol_type = other RNA
cccaggggcctggtgaccttcaaggacgtggccgtggacttcacccaggaggagtggggcctgctggaccacaaccagaaggagctgtacaaggaggtgatgctggagaacgccaggaacctgctgagcctgggcctgcccgtgcccagggaggacgtgatcagctacttcgagcagagggaggccccctggatgctggagcaggagggcctgaggagcaggtgcctggagggcgagatcagg

SEQ ID NO: 19392 - RNA, 243 nt, synthetic construct
  source 1..243: mol_type = other RNA
ggccaggagagcgtgaccttcaccgacgtggccgtggacttcaccctggaggagtgggcctacctggaccacttccagaaggagctgtacaaggacgtgatgctggagaactacaggaacctgctgtgcctgggcctggccgtgagcaagcccgacgtgatcagccagctggagcagggcgacgccccctggatgagcgagggcggcgtgcccaggagcatctacagcgactgggagaccagg

SEQ ID NO: 19393 - RNA, 243 nt, synthetic construct
  source 1..243: mol_type = other RNA
agccacggccccctgagcttcgaggacgtggccgtggccttcaccaaggaggagtggcagcagctggaccccgcccagaggaccctgtacagggacgtgatgctggagaacttcagccacctggtgagcctgggccaccccgtgagcaagcccgacgtgatcagcaagctggagcagggcgaggagccctggatcatcaagagggacatccccaactggatctaccccgagagggagaacagg

SEQ ID NO: 19394 - RNA, 243 nt, synthetic construct
  source 1..243: mol_type = other RNA
gccctgaggagcgtgatgttcagcgacgtgagcatcgacttcagccccgaggagtgggagtacctggacctggagcagaaggacctgtacagggacgtgatgctggagaactacagcaacctggtgagcctgggctgcttcatcagcaagcccgacgtgatcagcctgctggagcagggcaaggagccctggaaggtggtgaggaagggcaggaggcagtaccccgacctggagaccaagtac

SEQ ID NO: 19395 - RNA, 243 nt, synthetic construct
  source 1..243: mol_type = other RNA
agcaaggtgcccgtgaccttcggcgacctggccatctacttcagccaggaggagtgggagtggctgagccccatccagaaggacctgtacgaggacgtgatgctggagaactaccagaacctggtgagcctgggcctgagcttcaggaggcccaacgtgatcaccctgctggagaagggcaaggccccctggatggtggagcccgtgaggaagaggaggggcgtggacagcggcagcaagtgc

SEQ ID NO: 19396 - RNA, 243 nt, synthetic construct
  source 1..243: mol_type = other RNA
aggcccagggccgtgaagttcgccgacgtggccgtgtacttcagcaccgaggagtggggctgcctgaggcccgcccagagggccctgtacagggacgtgatgagggagacctacggccacctgggcgccctgggctgcgccggccccaagcccgccctgatcagctggctggagaggaacaccgacgactgggagcccgccgccctggacccccaggagtgccccaggggcgtggccgtgcag

SEQ ID NO: 19397 - RNA, 243 nt, synthetic construct
  source 1..243: mol_type = other RNA
atgcaggagagcgtgaccttcaaggacgtggccgtggacttcacccaggaggagtggaagcagctggaccccgcccagagggacctgtacagggacgtgatgctggagaactacaggaacctggtgagcctgggcctgcccgtgttcaagcccgacgtgatcagccagctggagaagggcgaggccccctggacccccgaggtgcccaggagcacctgcagcggcagcttcagccaggaggcc

SEQ ID NO: 19398 - RNA, 243 nt, synthetic construct
  source 1..243: mol_type = other RNA
aagcccctggccgtgaggttcgccgacgtggccgtgtacttcagccccgaggagtggggctgcctgaggcccgcccagagggccctgtacagggacgtgatgcaggagacctacggccacctgggcgccctgggcttccccggccccaagcccgccctgatcagctggatggagcaggagagcgaggcctggagccccgccgcccaggaccccgaggagggcgagagcctgggcggcgccctg

SEQ ID NO: 19399 - RNA, 243 nt, synthetic construct
  source 1..243: mol_type = other RNA
ccccaggagcccgtgaccttcgccgacgtggccgtgctgttcacccccgaggagtggctgttcctggacagcgcccagaagagcctgtacagggacgtgatgctggagaactacaggaacctggccagcgtgggcgaccagctgtgcaagaccaggatgagcagccacatggagcagagggaggagctgtgcgtgaccgagaggggcgtgttccccggcgcccacctgggcccccacctgcag

SEQ ID NO: 19400 - RNA, 243 nt, synthetic construct
  source 1..243: mol_type = other RNA
ttccaggagagcgtgaccttcaaggacgtggccgtggacttcacctgggaggagtggggctacctggacaccagccagaaggagctgtactgggaggtgatgctggagaactacaggaacctggtgagcctgggcctggccgacagcaacgtgaacatgatcagccagctggagagcggcgaggcccacggcatcagcgtggacagcgtgctgaggagctgctggcccgacggcgacaccagg

SEQ ID NO: 19401 - RNA, 243 nt, synthetic construct
  source 1..243: mol_type = other RNA
ggcccctggaccctgctgaccttcagggacgtggccatcgagttcagccaggaggagtggggctgcctgaaccacagccagagggagctgtacagggacgtgatgctggagacctacggccacctgctgttcctgggcctggtgagcaagcccgacctggtgatcctgctggagcagaagaaggagctgtggggcgtgaagaggaaggagaccgtggccagccaccccggcaggtgggagatc

SEQ ID NO: 19402 - RNA, 243 nt, synthetic construct
  source 1..243: mol_type = other RNA
ttccagggcagcgtgaccttcgaggacgtggccatcgccttcagccagcaggagtgggagagcctggacagcagccagaggggcctgtacagggacgtgatgctggagaactacaggaacctggtgagcatgggccacagcctgagcaagccccacgtgatcgccctgctggagaggtggaaggagcccaaggtgaccgacaggaaggacggcaggaggtggtgcaccgacctgcagctggag

SEQ ID NO: 19403 - RNA, 243 nt, synthetic construct
  source 1..243: mol_type = other RNA
cagaaccccgtgaccttcagggacgtggccgtggacttcagcctggaggagtggaagtgcctgagccccgcccagagggccctgtacagggacgtgatgctggagaactacgagaacctggccagcgtgggccccaggctgcccttcagcaagccctacgtgatcagccagctggagaggggcgaggccccctggatgcccgaggaggaggtgcccagggaccactggcccgacctgttcaac

SEQ ID NO: 19404 - RNA, 243 nt, synthetic construct
  source 1..243: mol_type = other RNA
agccagatccccctgaccttccaggacgtggccgtggacttcacctgggaggagtggggcctgctggagcccagccagaaggacatgtactgggacgtgatgctggagaactacgagaacttcgtgagcctgggcggcctgcccatctgcctgcccgacgtgatcagcaggatggagaggatcgaggccccctggatggccgagggcggcgtgctggtgagcaccttcctgggcagcctgagc

SEQ ID NO: 19405 - RNA, 243 nt, synthetic construct
  source 1..243: mol_type = other RNA
ctgcaggagagcgtgaccttcaaggacgtggccgtgctgttcacccaggacgagtgggcccagctgagccccgcccagagggccctgtacagggacgtgatgctggagaactacagccacctggtgagcctgggcctgctgggccccaagcccgacctgttcgcccagctgggcaagggcgaggagtggacccccgaggacaccagcaggggcttctgcctggactggatgaccatccccgtg

SEQ ID NO: 19406 - RNA, 243 nt, synthetic construct
  source 1..243: mol_type = other RNA
gaggagctgcccgtggtgttcgaggacgtggccgtgtacttcaccagggaggagtggggcatgctggtgaagaggcagaaggagctgtacagggacgtgatgaggatgaactacgagctgctggccagcctgggccccgccgccgccaagcccgacctgatcctgaagctggagaggagggccgccccctggatcaaggaccccaacggccccaagtggggcaagggcaggccccccggcaag

SEQ ID NO: 19407 - RNA, 243 nt, synthetic construct
  source 1..243: mol_type = other RNA
gaggagctgcccgtggtgttcgaggacgtggccgtgtacttcaccagggaggagtggggcatgctggtgaagaggcagaaggagctgtacagggacgtgatgaggatgaactacgagctgctggccgccctgggccccgccgccgccaagcccgacctgatcagcaagctggagaggagggccgccccctggatcaaggaccccaacaggcccaagtggggcaagggcaggcccctgggcaag

SEQ ID NO: 19408 - RNA, 243 nt, synthetic construct
  source 1..243: mol_type = other RNA
atgaccttcgaggacgtggccgtggagttcacccagtgggagtggggccagctggaccccgcccagcaggacctgtacagggaggtgatgctggagaacttcaagaacctggccagcctgggcctgcccgtgagcaagccctacgtgatcacccagctggaggagggcaaggacccctgcgtgctggacggcgagatcagcaccgagtacctgagccccccccccgactgggagaagaggccc

SEQ ID NO: 19409 - RNA, 243 nt, synthetic construct
  source 1..243: mol_type = other RNA
atcggcagcgacctgttcagggacgtggccgtggtgttcagcagggaggagtgggagcagctgacccccgcccagagggacctgtacagggacgtgatgctggagatctacagcatcctgctgagcctgggccccgacctggccgtgagcaagcccgacgtgatcagcttcctggagcagggcaaggagccctggagggtggaggaggccgtgaccggcggcctgtgccccgtgctggagagc

SEQ ID NO: 19410 - RNA, 243 nt, synthetic construct
  source 1..243: mol_type = other RNA
gccaggggccccgtgagcttcgccgacgtggccgtgtacttcagccccgaggagtggggcaggctgaggcccgcccagagggccctgtacagggacgtgatgagggagacctacggccacctgggcgccctgggcttccccggccccaagcccgccctgatgtgctggatggacgaggagaccgaggtgtggggccccgacgccagggaccccgaggaggccggcgagaagggcaccgagaac

SEQ ID NO: 19411 - RNA, 243 nt, synthetic construct
  source 1..243: mol_type = other RNA
caggacctggtgaccttcaaggacgtgagcgtggacttcaccagggaggagtggatgaggctggaccacccccagagggccctgtacagggacgtgatgctggagaactacaggaacctggtgctggtgagcctgggccaccccatcagcaagcccgacgtgatcagcaggctggagcagggcggcgtgccctgggtgctgaagaagggcgccaccggcagggccttcagcgacagggagacc

SEQ ID NO: 19412 - RNA, 243 nt, synthetic construct
  source 1..243: mol_type = other RNA
ccccaggagagcgtgaccttcaaggacgtggccgtggacttcacctgggaggagtggggctacctggacaccagccagaaggagctgtactgggaggtgatgctggagaactacaggaacctggtgagcctgggcctggccgacagcaacgtggacatgatcagccagctggagagcggcgaggcccagggcatccccgtggacagcgtgctgaccagctgctggcccgacggcgacaggagg

SEQ ID NO: 19413 - RNA, 243 nt, synthetic construct
  source 1..243: mol_type = other RNA
gcccagaagagcctgaccctggaggacgtggccgtggacttcagcagggaggagtggaggctgctggcccccgcccagaaggacctgtacagggacgtgatgctggagaactacaggaacctggtgagcgtgggccaccaggccagcaagcccgacgtgctggccaagctggagaggggcgaggagccctgggccatcgaggaggaggtgaggagcggcaccagccccgagaccggcaaggtg

SEQ ID NO: 19414 - RNA, 243 nt, synthetic construct
  source 1..243: mol_type = other RNA
agccccaccctggtgaccttcaaggacatccacgtgaacttcaccagggaggagtggaacctgctggacgccgcccagcagatcatgtacaaggacgtgatgctggagaactacaagaacctggtgagcgtgggccaccagctgcccaagcccgacgtgatcctgcagctggagaagggcgaggagccctggctggtggagaggggcgtgaggcaggacaccaggcccgactgggacaccgcc

SEQ ID NO: 19415 - RNA, 243 nt, synthetic construct
  source 1..243: mol_type = other RNA
tacaaggagagcgtgatgttcagggacgtggccgtggacttcagccaggaggagtgggagtgcctggaccccgcccagagggacctgtacagggacgtgatgctggagaactacagcaacctgctgagcatgggcctgtacatccccaagccccaggtgatcagcctgctggagcagggcaaggagccctggatggtgggcagggagctgaccaggggcctgtgcagcgacctggagagcatg

SEQ ID NO: 19416 - RNA, 243 nt, synthetic construct
  source 1..243: mol_type = other RNA
agcctggagagcgacctgttcagggacgtggccgtggtgttcagccaggaggagtgggagcagctggtgcccacccagagggacctgtacagggacgtgatgctggagacctacaacaacctggtgagcctgggcctggccatcagcaagcccgacgtgatcagcttcctggagcagggcaaggagccctggatggtggagaaggccgccaccggcggcctgtgccccgtgctggagagcagg

SEQ ID NO: 19417 - RNA, 243 nt, synthetic construct
  source 1..243: mol_type = other RNA
ctgcagggcctgctgaccttcagggacgtggccatcgagttcagccaggacgagtggggctgcctgaaccagagccagagggagctgtacagggacgtgatgctggagacctacggccacctgctgttcctgggcctgatcgtgagcaagccccacctggtgatcttcctggagcagaagagggagctgtgggacgtgaagaggaagaagaccgtgaggacccagaagggcgagaacaccagc

SEQ ID NO: 19418 - RNA, 243 nt, synthetic construct
  source 1..243: mol_type = other RNA
ctgcaggtgagcgtgagcttcgaggacgtgaccgtggacttcagcagggaggagtggcagcacctggacagcgcccagaggaggctgtaccaggacgtgatgctggagaactacagccacctgctgagcctgggctacgaggtgcccaagcccgaggtgatcttcaagctggagcagggcgaggagccctgggccctgaaggagaagaccctgcaccacagctgcagcgacgacaccaccctg

SEQ ID NO: 19419 - RNA, 243 nt, synthetic construct
  source 1..243: mol_type = other RNA
aggcccggcgccgtgagcttcgccgacgtggccgtgtacttcagccccgaggagtggggctgcctgaggcccgcccagagggccctgtacagggacgtgatgagggagacctacggccacctgggcgccctgggcttcgccgacgccaagcccgtgctgatcgcctggctggagaggaaggccgaggtgtggacccccgaggccgaggaccccgaggagggcgccaggcaccccggcagcggc

SEQ ID NO: 19420 - RNA, 243 nt, synthetic construct
  source 1..243: mol_type = other RNA
ctgcaggacctggtgaccttcaaggacgtgaccgtggagttcaaccaggaggagtgggccctgctggacagcagccagcagaagctgtacagggacgtgatgctggagaactacggcaacctggccagcctgggctaccacgtggacaagcccagcctgatcagccagctggagcaggaggacaaggtgatgaccgaggagggcggcatcctgcccggcacctgccccgacctggagaccgtg

SEQ ID NO: 19421 - RNA, 243 nt, synthetic construct
  source 1..243: mol_type = other RNA
caggccggcagcgacctgttcagggacgtggccgtggtgttcagccaggaggagtgggagcagctggcccccacccagagggacctgtacagggacgtgatgctggagacctacagcaacctggtgagcctgggcctggccgtgagcaagcccgacgtgatcagcttcctggagcagggcaaggagccctggaccgtggagggcgtggccaccggcggcctgtgccccgtgctgaagagcagg

SEQ ID NO: 19422 - RNA, 243 nt, synthetic construct
  source 1..243: mol_type = other RNA
cagggcctggtgagcttcaaggacgtggccgtggacttcacccaggaggagtggcagcagctggaccccgcccagaggaccctgtacagggacgtgatgctggagaacttcagccacctggtgagcatcggctacgccgtgagcaagcccgacgtgatcagcaagctggagcagggcgaggacccctggatcatcaagagggacatccccaactggatctaccccgacgagaaccaggccgac

SEQ ID NO: 19423 - RNA, 243 nt, synthetic construct
  source 1..243: mol_type = other RNA
agccagggcctggtgagcttcaaggacgtggccgtggacttcacccaggaggagtggcagcagctggaccccgcccagaggaccctgtacagggacgtgatgctggagaacttcagccacgtgatcagcctgggctaccccgtgagcaagcccgacgtgatcagcaagctggagcagggcgaggacccctggatcatcaagagggacgtgagcaactggatctacaccgacgagaaccaggcc

SEQ ID NO: 19424 - RNA, 243 nt, synthetic construct
  source 1..243: mol_type = other RNA
gcccagggcctggtgaccttcagggacgtggccatcgagttcagccaggaggagtggaagtgcctggagcccgcccagaggaacctgtacagggacgtgaccctggagaacttcagcaacctggtgagcctgggcctgagcatcagcaagcccgacctgatcagcctgctggagcagggcagggagccctggatgatcgccaacgacatgaccggcccctggtgccccgagctggagagcagg

SEQ ID NO: 19425 - RNA, 243 nt, synthetic construct
  source 1..243: mol_type = other RNA
ggcaagcccggcgccctgagcttcgccgacgtggccgtgtacttcagcagcgaggagtggggctgcctgaggcccgcccagagggccctgtacagggacgtgatgagggagacctacggccacctgggcgccctgggcgaggccaggccccccgccctgatcagctggatggagaggaagaaggaggcctggagccccgaggccgaggaccccgaggacagggccaggcaccccggctacggc

SEQ ID NO: 19426 - RNA, 243 nt, synthetic construct
  source 1..243: mol_type = other RNA
gtgcagggcagcgtgagcttcgaggacgtggccgtgggcttcagccaggaggagtggcagatcctgggccccagccagaaggccctgtactgggacgtgatgctggagaactactgcaacctggtgagcgtgggctaccaggcccccacccccaacagcctgttccagctggagcagggcggccccccctggaccgtggagggcgccgccctgagccccacctgcagcggcaagaagctgtac

SEQ ID NO: 19427 - RNA, 243 nt, synthetic construct
  source 1..243: mol_type = other RNA
aggaagaggggcagcctgaccctggaggacgtggccgtggacttcacctgggaggagtggcagctgctggcccccgcccagaaggccctgtacagggacgtgatgctggagaactacggcaacctggtgttcgtgggctaccaggccagcaagcccgccgccctgagcaggctggagaggggcgagccctggcccgtggaggacgaggtgcacagccagctgtgccccgagatgaggaaggac

SEQ ID NO: 19428 - RNA, 243 nt, synthetic construct
  source 1..243: mol_type = other RNA
agcgtggccttcagggacgtgatcgtggacttcacccaggaggagtggcagcagctgaagcccgcccagaaggacctgtacagggacgtgatgatggagaactactggaacctggtgagcctggacctggagaccaggcccgacaagaaggagagcgacccccaggaggacgactgggaggacaggcccagcatcgccgtggtggccgagggccccatgaggaccggcgaccagggctgcatc

SEQ ID NO: 19429 - RNA, 243 nt, synthetic construct
  source 1..243: mol_type = other RNA
cagcccgacctggtgaccttcggcgacgtggccgtggacttcagccaggaggagtgggagtggctgaaccccgcccagaggagcctgtacaggaccgtgatgctggacaactacaggagcctggtgagcctgggcgtgagcgccagcaagcccgacgtgatcagcctgctggagcagggcaaggagccctggctggtgaaggaggagggccccaggggcgccaggcccgacagcagccccacc

SEQ ID NO: 19430 - RNA, 243 nt, synthetic construct
  source 1..243: mol_type = other RNA
caggagcccgtgaccttcgaggacgtggccgtgtacttcacccagaaccagtgggccaagctggaccccacccagagggccctgtacagggaggtgatgctggagaactacgccaacgtggccagcctggtggccttccccttccccaagcccgacctggtgagccagctggagaggggcgaggtgccctggggccccgacccctgggaggccgaggtgctgaggggcatctgccccggcggc

SEQ ID NO: 19431 - RNA, 243 nt, synthetic construct
  source 1..243: mol_type = other RNA
ggcccctggaccctgctgaccttcagggacgtggccatcgagttcagccaggaggagtggggctgcctgaaccacagccagagggagctgtacagggacgtgatgctggagacctacggccacctgctgttcctgggcctggtgagcaagcccgacctggtgatcctgctggagcagaagaaggagctgtggggcgtgaagaggaaggagaccgtgggctgccagttcgagggccacgtgacc

SEQ ID NO: 19432 - RNA, 243 nt, synthetic construct
  source 1..243: mol_type = other RNA
agcgtgaccttcagggacgtgatcgtggacttcacccaggaggagtgggagcagctgaagcccgtgcagaaggacctgtacagggacgtgatgatggagaactactggaacctggtgagcctggacctggagaccgagggcgacatgaacgaccccgaccccgagaaggacagctgggaggacaggcccagcgtgaccagcagcatgcccgccccccccaggctggagggccccaggggcgcc

SEQ ID NO: 19433 - RNA, 243 nt, synthetic construct
  source 1..243: mol_type = other RNA
atctgggacctggtgatgttcagggacgtggccgtggacttcagccaggaggagtgggagtgcctgaacagctaccagaggaacctgtacagggacgtgatcctggagaactacagcaacctggtgagcctgggctgcagcatcagcaagcccgacgtgatcaccctgctggagcagggcaaggagccctggatggtgatgagggacgagaagaggaggtggaccctggacctggagagcagg

SEQ ID NO: 19434 - RNA, 243 nt, synthetic construct
  source 1..243: mol_type = other RNA
agccaggagagcgtgaccttccaggacgtggccgtggacttcaccagggaggagtggaagaggctggacagcgcccagagggacctgtacagggacgtgatgctggagaactaccagaacctggtgagcctgggcctgctggtgttccagagcgacgtgatcagccagctggagaacggcgaggtgcccctggtgcccggcggcgaggtgcccaggggcaccaggcccggcagcgtgaaccag

SEQ ID NO: 19435 - RNA, 243 nt, synthetic construct
  source 1..243: mol_type = other RNA
atgatgggcctggtgaccttcgaggacgtggccgtggacttcacccaggaggagtggcagtacctgaaccccccccagaggatcctgtacaggggcgtgatgatggagacctacaggaacctggtgttcgtggccggccagcaggccaccaagcccgacctgatcctgaagatggaggtggaggagccctacctggccgaggacaagatccccatctggagctgccccgaggaggcctgccag

SEQ ID NO: 19436 - RNA, 243 nt, synthetic construct
  source 1..243: mol_type = other RNA
ctgcaggagagcgtgaccttcagggacgtggccgtgttcttcagccaggacgagtggctgaggctggacagcgcccagaggaccctgtacagggaggtgatgctggagaactacggcaccctggtgagcctgggcatccccttcagcacccccaaggtgatctgccagctgcagcagggcgaggacccctgcgtggtggacagggagctgccccaggacgcctggcccggcctgaagacccag

SEQ ID NO: 19437 - RNA, 243 nt, synthetic construct
  source 1..243: mol_type = other RNA
aagcagggcggcgtgaccttcgaggacgtggccgtgtacttcagccaggaggagtggagcctgctgaacgaggcccagaggaggctgtaccacgacgtgatgctggagaacttcgccctgatcagcagcctgggctgctgctgcagggccgaggccgtggagacccccttcgagcagagcatcagcgtgggcgtgagccaggccaagacccccaaggagcccaggagcagccagaagacccac

SEQ ID NO: 19438 - RNA, 243 nt, synthetic construct
  source 1..243: mol_type = other RNA
agccagggcagcgtgaccttcagggacgtggccatcgacttcagccaggaggagtgggagtggctgcagcccacccagagggacctgtacaggcacgtgatgctggagaactacagccacctggtgagcctgggcctgaacatcagcaagccctacgtggtgagcctgctggagcagggcaaggagccctggctggagaagaggggcgtgaggaggaacctgttcagcgagcccaacagggag

SEQ ID NO: 19439 - RNA, 243 nt, synthetic construct
  source 1..243: mol_type = other RNA
aagcccggcgccgtgagcttcgccgacgtggccgtgtacttcagccccgaggagtggggctgcctgaggcccgcccagagggccctgtacagggacgtgatgagggagacctacggccacctgggcgccctgggcttcaggggcaccaagcccgccctgatcagctgggtggaggaggaggccgacctgtggggccccgacgccagggaccccgaggtgggcgagtgcctgaccgccgccgac

SEQ ID NO: 19440 - RNA, 243 nt, synthetic construct
  source 1..243: mol_type = other RNA
ggcctgctgagcttcgaggacgtggccctgtacttcaccagggaggagtgggacaccctggactgggcccagaaggccctgtacagggacgtgatgctggacaactacaggcacatcgtgagcctgggcttccccttccccaagcccgaggtgatctgccagctggagcagtgggaggagccctggatcctggacctgcccagggccggcaccaggaaggccagcggcagcgcctgccccgac

SEQ ID NO: 19441 - RNA, 243 nt, synthetic construct
  source 1..243: mol_type = other RNA
accgtgggcagcgtgatgttcagcgacgtgagcgtggacttcagccaggaggagtgggagtgcctggaccccggccagagggacctgtacagggacgtgatgctggagaactacagcaacctgctgagcatgggcctgtacatccccaagccccaggtgatcagcctgctggagcagggcaaggagccctggatggtgggcagggagctgaccaggggcctgtgcagcgacctggagagcatg

SEQ ID NO: 19442 - RNA, 243 nt, synthetic construct
  source 1..243: mol_type = other RNA
agcaaggtgcccgtgaccttcggcgacctggccatctacttcagccaggaggagtgggagtggctgagccccatccagaaggacctgtacgaggacgtgatgctggagaactaccagaacctggtgagcctgggcctgagcttcaggaggcccaacgtgatcaccctgctggagaagggcagggccccctggatggtggagcccgtgaggaagaggaggggcctggacagcaggagcaagtac

SEQ ID NO: 19443 - RNA, 243 nt, synthetic construct
  source 1..243: mol_type = other RNA
aagcccggcgccgtgagcttcgccgacgtggccgtgtacttcagcagggaggagtggggctgcctgaggcccgcccagagggccctgtacagggacgtgatgagggagacctacggccacctgggcgccctgggcgtgggcggcagcaagcccgccctgatcagctgggtggaggagaaggccgagctgtgggaccccgccgcccaggaccccgaggtggccaagtgccccaccgaggccgac

SEQ ID NO: 19444 - RNA, 243 nt, synthetic construct
  source 1..243: mol_type = other RNA
ccccagaagagcgtgaccttcgaggacgtggccgtgtacttcacccagaccgagtgggacggcctgagccccgcccagagggccctgtacagggacgtgatgctggagaactacggcaacgtggccagcctgggcttcagcctgctgaagcccgccgtgatcagccagctggagggcgccgacgagctggagggccccagccccctggtggccggcaccgagatcggcccccagggcctgtgg

SEQ ID NO: 19445 - RNA, 243 nt, synthetic construct
  source 1..243: mol_type = other RNA
aggcaggagcccgtgaccttcgaggacgtggccgtgtacttcacccagaacgagtgggccagcctggacagcgtgcagagggccctgtacagggaggtgatgctggagaactacgccaacgtggccagcctggccttccccttcatcacccccgtgctggtgagccagctggagcagggcgagctgccctggggcctggacccctgggagcccatgggcagggaggccctgaggggcatctgc

SEQ ID NO: 19446 - RNA, 243 nt, synthetic construct
  source 1..243: mol_type = other RNA
ctgcagggcagcctgagcttcgaggacgtgaccgtgggcttcagccaggaggagtggcagaggctggaccccgcccagaggaccctgtacagggacgtgatgctggagaactacagccacctggtggccgtgggctgctgcgtgcccaagcccgacgtgatcttcaggctggagcagggccagcagccctggctggtggaggaggagagcctggaccagagctgccccgaggtgtgcagggtg

SEQ ID NO: 19447 - RNA, 243 nt, synthetic construct
  source 1..243: mol_type = other RNA
aaggagaagctggtgaccttcgaggacgtggccgtgtacttcacccaggccgagtgggacggcctgagccccgcccagaggaccctgtacagggacgtgatgctggagaactacggcaacgtggccagcctgggcttccccctgctgaagcccgccgtgatcagccagctggagggcggcggcgagctgggcggccccagccccctggccgccggcaccggcctgtggggcctgaggaccggc

SEQ ID NO: 19448 - RNA, 243 nt, synthetic construct
  source 1..243: mol_type = other RNA
ccccaggagagcgtgaccttcgaggacgtggccgtgaacttcagctacgaggagtggcagtgcctgacccacgcccagaggcacctgtacaccgacgtgatgctggagaactacggcaacatggtgagcctgggcttcagcttcagcaagccccccctgatcagcaggctggagcagggcaccgagccctacgtgcaggacaggcaggactgggagttcctgaactgcagctaccccgccgcc

SEQ ID NO: 19449 - RNA, 243 nt, synthetic construct
  source 1..243: mol_type = other RNA
gtgaccgagctgctgaccttcaaggacatcagcgtggacttcacccaggaggagtggggccagctggcccccgcccacaggaacctgtacagggaggtgatgctggagaactacggcaacctggtgagcgtggccggctgccagctgagcaagcccagcgtgatcagccagctggagaagggcgaggagccctggatgaccgagaaggagggcgccggcgaccccagcagcgacctgaagagc

SEQ ID NO: 19450 - RNA, 243 nt, synthetic construct
  source 1..243: mol_type = other RNA
ttccaggagagcgtggccttcgaggacgtggccgtgtacttcacccagaaccagtggggcagcctggaccccgcccagagggccctgtacagcgaggtgatgctggagaactacgccaacgtggccagcctggtggccttccccttccccaagcccgccctgatcagccacctggagaagggcgaggccccctggggccccgacccctgggacgccgagatccccagcggcatcaaccagggc

SEQ ID NO: 19451 - RNA, 243 nt, synthetic construct
  source 1..243: mol_type = other RNA
tacaccctggagagcctgaccctggaggacgtggccgtggacttcacccaggaggagtggaggctgctggcccccgcccagaaggacctgtactgggacgtgatgctggagaacttcaggaacctggtgagcgtgggctacgtggccagcatgcccgccgccctgagcaggctggagaggggcggccagtggatgaccgaggacgagaccaggcactggatctgccccgagatcaagaaggac

SEQ ID NO: 19452 - RNA, 243 nt, synthetic construct
  source 1..243: mol_type = other RNA
agcctggagagcgagctgttcagggacgtggccatcgtgttcagccaggaggagtggcagtgcctggcccccgcccagagggacctgtacagggacgtgatgctggagacctacagcaacctggtgagcctgggcctggccatcagcaagcccgacgtgatcagcttcctggagcagggcaaggagccctggatggtggagagggtggtgagcggcggcctgtgccccgtgctgaagtacagg

SEQ ID NO: 19453 - RNA, 243 nt, synthetic construct
  source 1..243: mol_type = other RNA
ttccaggaggccgtgaccttcaaggacgtggccgtggccttcaccgaggaggagctgggcctgctggaccccgcccagaggaagctgtacagggacgtgatgctggagaacttcaggaacctggtgagcgtgggccaccagagcttcaagcccgacatgatcagccagctggagagggaggagaagctgtggatgaaggagttccagacccagaggggcaagcacagcggcgacaggaacctg

SEQ ID NO: 19454 - RNA, 243 nt, synthetic construct
  source 1..243: mol_type = other RNA
ccccaggagagcgtggccttcgacgacgtggccgtgtacttcaccaagaaggagtgggccatcatggtgcccgaccagagggccctgtacagggacgtgatgctggagaactacgaggccgtggccttcgtggccgtgccccccaccagcaagcccgccctggtgagccacctggagcagggcaaggagccctgcttcacccagccccagggcgtgctgagcaggagggactggagggccggc

SEQ ID NO: 19455 - RNA, 243 nt, synthetic construct
  source 1..243: mol_type = other RNA
ccccaggtgagcctgaccttcgaggacgtggccgtgctgttcaccagggacgagtggaggaagctggcccccagccagaggaacctgtacagggacgtgatgctggagaactacaggaacctggtgagcctgggcctgcccttcaccaagcccaaggtgatcagcctgctgcagcagggcgaggacccctggaaggtggagaaggactgcttcggcggcagcttcctgggctgcaagagcaac

SEQ ID NO: 19456 - RNA, 243 nt, synthetic construct
  source 1..243: mol_type = other RNA
agctgcgagggcagcgtgagcttcagggacgtggccatcaacttcagcagggaggagtggcagcacctggaccccagccagaggaacctgtacagggacgtgatgctggagacctacagccacctgctgagcgtgggctaccaggtgcccgaggccgaggtggtgatgctggagcagggcaaggagccctgggccctgcagggcgagaggcccaggcagagctgccccggcgagaagctgtgg

SEQ ID NO: 19457 - RNA, 243 nt, synthetic construct
  source 1..243: mol_type = other RNA
agctacgagggcagcgtgagcttcagggacgtggccatcgacttcagcagggaggagtggaggcacctggacctgagccagaggaacctgtacagggacgtgatgctggagacctacagccacctgctgagcgtgggctaccaggtgcccgaggccgaggtggtgatgctggagcagggcaacgagccctgggccctgcagggcgagaggccccaccagagctgccccggcgagaagctgtgg

SEQ ID NO: 19458 - RNA, 243 nt, synthetic construct
  source 1..243: mol_type = other RNA
ggccccctgaccttcagggacgtgaccatcgagttcagccacgaggagtggaagtgcctggaccccgcccagaaggccctgtacaaggacgtgatgctggagaactacaggaacctggtgttcctgggcatcacccccaagtgcaccaccaaggagctgccccccatcggcaacaacaacaccggcgagaagttcaggaccgtgaccctggagaggcacgagtgctacgacatcgaggacatc

SEQ ID NO: 19459 - RNA, 243 nt, synthetic construct
  source 1..243: mol_type = other RNA
gagatggagcccctgaccttcagggacgtggccatcgagttcagcctggaggagtggcagtgcctgaaccccgcccagcaggacctgttcaggaacgtgatgctggagaactacaggaacctggtgttcctgggcatcgccgccagcaagcccgacctgatcacctgcctggagaaggccaaggagccctggaagatgaagcagcacgagatggtggacgagccccccggcgccagcaccttc

SEQ ID NO: 19460 - RNA, 243 nt, synthetic construct
  source 1..243: mol_type = other RNA
agcgtggccttcgaggacgtggccgtgaacttcacccaggaggagtggagcctgctggaccccagccagaagaacctgtacagggaggtgatgcaggagaccctgaggaacctggccagcatcggcaagaagtggaaggaccagaacatcgagaacgagtacaagaaccccaggagcaaccagaggggcctgatggaggagaggctgttcgagagcgagggccaccagcccggcgagatcctg

SEQ ID NO: 19461 - RNA, 243 nt, synthetic construct
  source 1..243: mol_type = other RNA
agcaaggcccccatcaccttcggcgacctggccatctacttcagccaggaggagtgggagtggctgagccccatccagaaggacctgtacgaggacgtgatgctggagaactacaggaacctggtgagcctgggcctgagcttcaggaggcccaacgtgatcaccctgctggagaagggcaaggccccctggatggtggagcccgccaggaggaggaggggccccgagctgaccgaggccagc

SEQ ID NO: 19462 - RNA, 243 nt, synthetic construct
  source 1..243: mol_type = other RNA
atgaagctgggcagcgtgaccttcgaggacgtggccgtgtacttcagctgggaggagtgggccctgctggacgaggcccagaggtgcctgtaccacgacgtgatgctggagaacttcgccctgaccagcagcctggtggtgagcagcagcagccacaccatcgcccagctgggcctgggcgaggagagcttcgtgctgcccaggatgcacatgatccccctgagcaccaggtgggcccagagg

SEQ ID NO: 19463 - RNA, 243 nt, synthetic construct
  source 1..243: mol_type = other RNA
ccccaggagagcgtggccttcgaggacgtggccgtgtacttcaccaccaaggagtgggccatcatgatgcccgccgagagggccctgtacagggacgtgatgctggagaactacgaggccgtggccttcgtggtgccccccaccagcaagcccgccctggtgagccacctggagcagggcaaggagagctgcttcatccagccccagggcgtgctgagcaggagcgactggagggccggcctg

SEQ ID NO: 19464 - RNA, 243 nt, synthetic construct
  source 1..243: mol_type = other RNA
agccagggcagcgtgaccttcagggacgtggccatcgacttcagccaggaggagtggaagtggctgcagcccgcccagagggacctgtacaggtgcgtgatgctggagaactacggccacctggtgagcctgggcctgagcatcagcaagcccgacgtggtgagcctgctggagcagggcaaggagccctggctgggcaagagggacgtgaagagggacctgttccccgccctgagcccccag

SEQ ID NO: 19465 - RNA, 243 nt, synthetic construct
  source 1..243: mol_type = other RNA
cagcagaggcccgtgagcttcaaggacgtggtggtgggcttcacccaggaggagtggcacaggctgaaccccgcccagagggccctgtacagggacgtgatgctggagacctacagcaacctggtgagcgtgggctacgagggcaccaagccctacgtgatcctgaagctggagcaggaggaggccccctggatctgcgaggccgcctgcagcggctgccactgccaggagaacatctgccag

SEQ ID NO: 19466 - RNA, 243 nt, synthetic construct
  source 1..243: mol_type = other RNA
ctgcaggtgagcgtgagcttcgaggacgtgaccgtgaacttcagcagggaggagtggcagaggctggaccccgcccagaggaggctgtacagggacgtgaccctggagaactacagccacctgaggagcgtgggctaccaggtgcccaagcccgaggtgatcttcaagctggagcagggcgagggcccctggaccctggagggcgagaccccccaccagagctgcagcggcgaggacatcggc

SEQ ID NO: 19467 - RNA, 243 nt, synthetic construct
  source 1..243: mol_type = other RNA
aacagccagggcctgctgaccttcagggacgtggccatcgagttcagccaggaggagctgaggtgcctgaaccacagccagtgggagctgtacagggacgtgatgttcgagaactacggccacctgctgttcctgggcctggtggtgagcaagcccgacctggtgatcttcctggagcagaagaaggacgtgtgggccgtgaagaggaaggagaccgtggccacccaccccggcaggtgggag

SEQ ID NO: 19468 - RNA, 243 nt, synthetic construct
  source 1..243: mol_type = other RNA
gcccagaaggtgctgaccttcagggacgtggccatcgagttcagcctggaggagtggaagttcctggaccccgcccagcagaacctgtacagggacgtgatgctggagaactacaggaacctgttcagcatcggcctgaccgtgagcaagcccggcctgatcacctgcctggagcagaggaaggccccctggaacctgaagaggagggaggccgtggacggccaccccgccatgagcagccac

SEQ ID NO: 19469 - RNA, 243 nt, synthetic construct
  source 1..243: mol_type = other RNA
atggcccacctgatgttcagggacgtggccatcgacttcagccaggaggagtgggagggcctggacctgaagcagagggacctgtacagggacgtgatgctggagaactacagcaacatggtgagcctgggcctgtgcatctaccagcccgacgtgttcagcctgctggagaagggcaaggagccctggaagatcctgagggacgagaccaggggcccctgccccgacatgcagagcaggtgc

SEQ ID NO: 19470 - RNA, 243 nt, synthetic construct
  source 1..243: mol_type = other RNA
aagcccggcgccctgagcttcgccgacgtggccgtgtacttcagcagcgaggagtggggctgcctgaggcccgcccagagggccctgtacagggacgtgatgagggagacctacggccacctgggcgccctgggcttcgccggccccaagcccgccctgatcagctggatggagaggaagaaggaggcctggagccccgaggccgaggaccccgaggacagggccaggcaccccggctacggc

SEQ ID NO: 19471 - RNA, 243 nt, synthetic construct
  source 1..243: mol_type = other RNA
atggccttcgaggacgtggccgtgtacttcagccaggaggagtggggcctgctggacaccgcccagagggccctgtacaggagggtgatgctggacaacttcgccctggtggccagcctgggcctgagcaccagcaggcccagggtggtgatccagctggagaggggcgaggagccctgggtgcccagcggcaccgacaccgtgctgagcaggaacacctacaggaggaggaaccccggcagc

SEQ ID NO: 19472 - RNA, 243 nt, synthetic construct
  source 1..243: mol_type = other RNA
ttccagggcagcgtgaccttcagggacgtgagcatcgacttcagccaggaggagtgggagtggctgcagcccgcccagagggacctgtacaggcacgtgatgctggagaactacggccacctggtgagcctgggcctgaacatgagcaagcccgacgtggtgagcctgctggagcagggcaaggagccctggctgggcaacggcgacgtgagcagggagctgttccccgccagcaagagcaac

SEQ ID NO: 19473 - RNA, 243 nt, synthetic construct
  source 1..243: mol_type = other RNA
gtgcaggagcccgtgaccttcaaggacgtggccgtggacttcacccaggaggagtggggccagctggacctggtgcagaggaccctgtacagggacgtgatgctggagacctacggccacctgctgagcgtgggcaaccagatcgccaagcccgaggtgatcagcctgctggagcagggcgaggagccctggagcgtggagcagacctgcccccagagggcctgccccgagtggatgaggaac

SEQ ID NO: 19474 - RNA, 243 nt, synthetic construct
  source 1..243: mol_type = other RNA
ccccaggagcccgtgaccttcgccgacgtggccgtgctgttcacccccgaggagtggctgttcctggacagcagccagaagagcctgtacagggacgtgatgctggagaactacaggaacgtggccagcgtgggcgaccagctgtgcaagaccaggatgagcagccacctggagcagagggaggagctgtgcgtgaccgagaggggcatcttccccggcgcccacctgggcccccacctgcag

SEQ ID NO: 19475 - RNA, 243 nt, synthetic construct
  source 1..243: mol_type = other RNA
cccctgggcagcgagctgttcagggacgtggccatcgtgttcagccaggaggagtggcagtggctggcccccgcccagagggacctgtacagggacgtgatgctggagacctacagcaacctggtgagcctgggcctggccatcagcaagcccgacgtgatcagcttcctggagcagggcaaggagccctggatggtggagagggtggtggccggcggcctgtgccccgtgctggagagcagg

SEQ ID NO: 19476 - RNA, 243 nt, synthetic construct
  source 1..243: mol_type = other RNA
gcccacatgagcctgagcttcagggacgtggccatcgacctgagccaggaggagtgggagtgcctggaccccgtgcagagggccctgtacagggacgtgatgctggagaactacagcaacctggtgagcctgggctgcagcacccccaagcccgacatgatcaccctgctggagcaggagaaggagccctggatgatcatgagggagggcaccggcagctggttcaccggcctggagagcaag

SEQ ID NO: 19477 - RNA, 243 nt, synthetic construct
  source 1..243: mol_type = other RNA
gcccaggtgagcgtgaccttcgacgacgtggccgtgaccttcacccaggaggagtggggccacctggagcccgcccagaggaccctgtaccaggaggtgatgctggagacctgcaggctgctgatgagcctgggctgccccgtgcccaggcccgagctgatctaccagctggagcacggccaggagctgtggaccgtgaagagggacctgagcaggagcacctgccccggctacagcagcgag

SEQ ID NO: 19478 - RNA, 243 nt, synthetic construct
  source 1..243: mol_type = other RNA
agccaggagctggtggccttcgaggacgtgctggtggacttcacccccgaggagtggcagtacctgaacagcagccagaagaccctgtacagggaggtgatgctggagacctacagcaacctggtgagcgtggccggccagcaggacaccaagcccgacctgatcctgaagctggagctggagggcccctgcctggccgagaggaagatcagcgtgtggagcttccccgaggaggcctgccag

SEQ ID NO: 19479 - RNA, 243 nt, synthetic construct
  source 1..243: mol_type = other RNA
aagcccggcgccctgagcttcgccgacgtggccgtgtacttcagcagcgaggagtggggctgcctgaggcccgcccagagggccctgtacagggacgtgatgagggagacctacggccacctgggcgccctgggctgcgccggccccaagcccgccctgatcagctggctggagaggaacaccgacgactgggagcccgccgccctggacccccaggagtgccccaggggcgtggccgtgcag

SEQ ID NO: 19480 - RNA, 243 nt, synthetic construct
  source 1..243: mol_type = other RNA
ctgcagggcggcgtgaccttcgaggacgtggccgtggacttcacccaggaggagtggcagaggctgagccccgagcagagggacctgtacagggacgtgaccctggagaactacaggaacctggtgagcatgggcgagcaggacagcaccaagcccgaggtgatcctgaggctggagaacggcgaggagccctggatggtgggcacccaggagctgaggagctgcagccccgccggcaaggac

SEQ ID NO: 19481 - RNA, 243 nt, synthetic construct
  source 1..243: mol_type = other RNA
ccccaggagagcgtggccttcgacgacgtggccgtgtacttcaccaagaaggagtgggccatcatggtgcccgaccagagggccctgtacagggacgtgatgctggagaactacgaggccgtggccttcgtggccgtgccccccaccagcaagcccgccctgatcagccacctggagcagggcaaggagccctgcttcacccagccccagggcgtgctgagcaggagggactggagggccggc

SEQ ID NO: 19482 - RNA, 243 nt, synthetic construct
  source 1..243: mol_type = other RNA
gccaaggcccccgtgaccttcggcgacctggccatctacttcagccaggaggagtgggagtggctgagccccatccagaaggacctgtacgaggacgtgatgctggagaactaccagaacctggtgagcctgggcctgagcttcaggaggcccaacgtgatcagcctgctggagaagggcaaggccccctggatggtggaccccgtgaagaggaggaggggcctggacctgggcagcaagtgc

SEQ ID NO: 19483 - RNA, 243 nt, synthetic construct
  source 1..243: mol_type = other RNA
tgcgagggcagcgtgagcttcgaggacgtgaccatggacttcagcagggaggagtggcagcagctggaccccgcccagaggtgcctgtaccaggacgtgatgctggagatctacagccacctgctgttcgtgggctacaacatccccaaccccgagatcatcagcaggatggagaagggcgaggagccctggatgagggaggtgcagctgccccaccagaggcacagggagagggccttcggc

SEQ ID NO: 19484 - RNA, 243 nt, synthetic construct
  source 1..243: mol_type = other RNA
atggccttcagggacgtggccgtggacttcacccaggacgagtgggtgctgctgagccccgcccagaggagcctgtacagggaggtgatgctggagaactacagcaacctggtgagcctgggcatccccttcagcaagcccaagctgatcacccagctggagcagggcaaggagagctggagggaggagaggaagtgcagccccgtgagctgcctgggcgagtggggccactgggtggtgcag

SEQ ID NO: 19485 - RNA, 243 nt, synthetic construct
  source 1..243: mol_type = other RNA
ttccagcacctggtgatgttcagggacgtggccgtggacttcagccaggaggagtgggagtgcctgaacagctaccagaggaacctgtacagggacgtgatcctggagaactacagcaacctggtgagcgtggccggctgcagcatcagcaagcccgacgtgatcaccctgctggagcagggcaaggagccctggatggtggtgagggacgagaggaggaggagcctggacctggagagcagg

SEQ ID NO: 19486 - RNA, 243 nt, synthetic construct
  source 1..243: mol_type = other RNA
agccagagcctggtgaccttcggcgacgtggccatcaacttcagccaggaggagtgggagtggctgaacagcgcccagaggaacctgtacaggagcgtgatgctggagaactacaggaacctggtgagcctgggcctgtgcgtgagcaagcccgacatgatcagcagcctggagcagaggaaggagccctggatggtgaagaggaagctgaccaggggcaggtgccccgacctgaaggccgtg

SEQ ID NO: 19487 - RNA, 243 nt, synthetic construct
  source 1..243: mol_type = other RNA
gccagcgtggtgttcgaggacgtggccgtgaacttcacccccgaggagtgggccctgctgaaccccggccagaggaagctgtacagggacgtgatgctggagacctgcaggaacctgagcgccgtgggctgcaggagccagggcaacaccagcacccccaggccccagtggagcatcctgctgaacgagccccccggcgaggacaagaccggcatcttcaccaggaaggacagctgcagcgtg

SEQ ID NO: 19488 - RNA, 243 nt, synthetic construct
  source 1..243: mol_type = other RNA
aggcccagggccgtgaagttcgccgacgtggccgtgtacttcagcaccgaggagtggggctgcctgaggcccgcccagagggccctgtacagggacgtgatgcaggagacctacggccacctgggcgccctgggctgcgccggccccaagcccgccctgatcagctggctggagaggaacaccgacgactgggagcccgccgccctggacccccaggagtgccccaggggcgtggccgtgcag

SEQ ID NO: 19489 - RNA, 243 nt, synthetic construct
  source 1..243: mol_type = other RNA
atggccttcgaggacgtggccgtgtacttcagccaggaggagtggggcctgctggacaccgcccagagggccctgtacaggcacgtgatgctggacaacttcaccctggtgaccagcctgggcctgagcaccagcaggccccacgtggtgatccagctggagaggggcgaggagccctgggtgcccagcggcaaggacatgaccctggccaggaacacctacaggaggctgaacgccggcgag

SEQ ID NO: 19490 - RNA, 243 nt, synthetic construct
  source 1..243: mol_type = other RNA
atggtgaccttcgaggacgtggccgtgcacttcaccaagaccgagtggaccggcctgagccccgcccagagggccctgtacaggagcgtgatgctggagaacttcggcaacctgaccgccctgggctaccccgtgcccaagcccgccctgatcagcctgctggagggcggcgacatggcctggggcctggaggcccaggacgaccccctggccgagaggaccaagaacatctgcaagggcgtg

SEQ ID NO: 19491 - RNA, 243 nt, synthetic construct
  source 1..243: mol_type = other RNA
gcccaggcccccctgagcttcgaggacgtggccgtgagcttcagcagggaggagtggaggctgctggtgcccgcccagaaggacctgtacagggacgtgatgctggagaactacaggaacctggtgagcgtgggctaccaggccagcgagcccgacagcctgttccagctggagcacggcggccccctgtgggtggtggagggcgccgcccccaggcccccctgccccgaggagatctgggag

SEQ ID NO: 19492 - RNA, 243 nt, synthetic construct
  source 1..243: mol_type = other RNA
agcctgggcagcgacctgttcagggacgtggccatcgtgttcagccaggaggagtgggagcagctggcccccacccagagggacctgtacagggacgtgatgctggagacctacagcaacctggtgagcctgggcctggccgtgagcaagcccgacgtgatcagcttcctggagcagggcaaggagccctggaccgtggaggaggtggccgccggcggcctgtgccccgtgctgaagagcagg

SEQ ID NO: 19493 - RNA, 243 nt, synthetic construct
  source 1..243: mol_type = other RNA
gccgccggcagggtgaccttcgaggacgtgaccgtgagcttcaccaagggcgagtggcagcagctgaaccccgagcagagggagctgtacagggacgtgatgctggagaactacggcaacctggtgagcgtgggcctggaggagaccagcaagcccagcgtgatcctgaggctggaggagggcaaggagccctggagcgaggaggaggtgctgaggggcggcaggcccgagaagaactgggac

SEQ ID NO: 19494 - RNA, 243 nt, synthetic construct
  source 1..243: mol_type = other RNA
ccccaggagagcgtggccttcgacgacgtggccgtgtacttcaccaagaaggagtgggccatcatggtgcccgaccagagggccctgtacagggacgtgatgctggagaactacgaggccgtggccttcgtggtgccccccaccagcaagcccgccctgatcagccacctggagcagggcaaggagccctgcttcacccagccccagggcgtgctgagcaggagggactggagggccggcttc

SEQ ID NO: 19495 - RNA, 243 nt, synthetic construct
  source 1..243: mol_type = other RNA
agccaggtgagcgtgaccttcgaggacgtggccgtgctgttcaccagggacgagtggaggaagctggcccccccccagaggaacctgtaccaggacgtgatgctggagaactacagcaacctggtgagcctgggcctgctgttccccaagcccaaggtgatcagcctgctgcagcagggcgaggacccctggaaggtggagaaggagaacctgggcggcagcagcctgggctggaagaacagc

SEQ ID NO: 19496 - RNA, 243 nt, synthetic construct
  source 1..243: mol_type = other RNA
tacaggggccccgtgaccttcaaggacatcaccgtggagttcaccagggaggagtggaagctgctggacaccgcccagaggaccctgtacagggaggtgatgcaggagaactacagccacctgatcagcgtgggctactgcgccaacaggcccaacgccatcttcaagctgaagcagggcaaggagccctggatcctggaggtgcagttccccaggcagaagaaccccgaggacctgtgcaac

SEQ ID NO: 19497 - RNA, 243 nt, synthetic construct
  source 1..243: mol_type = other RNA
aggcccagggccctgaagttcgtggacgtggccgtgtacttcagcagcgaggagtggggctgcctgaggcccgcccagagggccctgtacagggacgtgatgagggagacctacggccacctgggcgccctgggcttccccggccccaagcccgccctgatcagctggatggagcaggagagcgaggcctggagcagcgccgcccaggaccccgagaacggcgagagcctgggcggcgccagg

SEQ ID NO: 19498 - RNA, 243 nt, synthetic construct
  source 1..243: mol_type = other RNA
gtgaacgacctggtgaccttcaaggacgtggccatcgacttcagccaggaggagtggcagtggatgaaccccgcccagaagaggctgtacaggagcatgatgctggagaactaccagagcctggtgagcctgggcctgtgcgtgagcaagccctacgtgatcagcctgctggagcagggcagggagccctgggagatgaccagcgagatgaggaggagccccttcagcgactgggagagcatc

SEQ ID NO: 19499 - RNA, 243 nt, synthetic construct
  source 1..243: mol_type = other RNA
aagcccggcgccgtgagcttcgccgacgtggccgtgtacttcagccccgaggagtggggctgcctgaggcccgcccagaggagcctgtacagggacgtgatgagggagacctacggccacctgggcgccctgggcttccccggccccaagcccgccctgatcagctggatggagcaggagagcgaggcctggagcagcgccgcccaggaccccgagaagggcgagagcctgggcggcgcccag

SEQ ID NO: 19500 - RNA, 243 nt, synthetic construct
  source 1..243: mol_type = other RNA
ccccagaagagcgtgaccttcgaggacgtggccgtgtacttcacccagaccgagtgggacggcctgagccccgcccagagggccctgtacagggacgtgatgctggagaactacggcaacgtggccagcctgggcttccccctgctgaagcccaccgtgatcagccagctggagggcggcggcgagctggagggccccagccccctggccagcggcaccggcaccggcccccagggcctgtgg

SEQ ID NO: 19501 - RNA, 243 nt, synthetic construct
  source 1..243: mol_type = other RNA
acccccgacgtggtgaccttcgaggacgtggccgtgtgcttcagcagcggcgagtggcagtgcctgaccagggcccagaggcacctgtacaccgacgtgatgctggagaactacggcaacatgctgagcgccggcctggcctgccccaagccccccctgatcagccacctggagcagggcgccgtgccctgcgccgaggacctgcaggactggggcttcctgacctgcagcttccccgtgagc

SEQ ID NO: 19502 - RNA, 243 nt, synthetic construct
  source 1..243: mol_type = other RNA
caggccgaggtgaccttcgaggacgtggccgtgctgctgagcagggaggagtggggcaggctgggccccgtgcagaagggcctgtacagggacgtgatgctggagacctacaggaacctggtgagcctgggcggcggccccgccggccccaagcccgaggtgatcacccagctggagaggggcgacgagccctgggtgcccgacgtgcagggcagggagaggctgaccatcgacggcagcgcc

SEQ ID NO: 19503 - RNA, 243 nt, synthetic construct
  source 1..243: mol_type = other RNA
agcaaggcccccgtgaccttcggcgacctggccatctacttcagccaggaggagtgggagtggctgagccccatccagaaggacctgtacgaggacgtgatgctggagaactacaggaacctggtgagcctgggcctgagcttcaggaggcccaacgtgatcaccctgctggagaagggcaaggccccctggatggtggagcccgtgaggaggaggagggcccccgacagcggcagcaagtgc

SEQ ID NO: 19504 - RNA, 243 nt, synthetic construct
  source 1..243: mol_type = other RNA
ccccagaagagcgtgaccttcgaggacgtggccgtgtacttcacccagaccgagtgggacggcctgagccccgcccagagggccctgtacagggacgtgatgctggagaactacggcaacgtggccagcctgggcttcagcctgctgaagcccgccgtgatcagccagctggagggcgccggcgagctgggcggccccagccccctggtggacggcaccgagaccggcccccagggcctgtgg

SEQ ID NO: 19505 - RNA, 243 nt, synthetic construct
  source 1..243: mol_type = other RNA
atggccttcgaggacgtggccgtgtacttcagccaggaggagtggggcctgctggacaccgcccagagggccctgtacaggagggtgatgctggacaacttcgccctggtggccagcctgggcctgagcaccagcaggcccagggtggtgatccagctggagaggggcgaggagccctgggtgcccagcggcaaggacatgaccctggccaggaacacctacggcaggctgaacagcggcagc

SEQ ID NO: 19506 - RNA, 243 nt, synthetic construct
  source 1..243: mol_type = other RNA
ctgaagggcctggtgaccttcgaggacgtggccgtggagttcacccaggaggagtgggccctgctggaccccgcccagaggaccctgtacagggacgtgatgctggagaacttcaggaacctggccagcctgggcaaccaggtggacaagcccggcctgatcagccagctggagcaggaggacaaggtgatgaccgaggagaggggcatcttccccggcgcctgccccgacgtggagaacccc

SEQ ID NO: 19507 - RNA, 243 nt, synthetic construct
  source 1..243: mol_type = other RNA
ttccaggagcccgtgaccttcgaggacgtggccgtgtacttcacccagaaccagtgggccagcctggacagcgcccagagggccctgtacagggaggtgatgctggagaactacgccaacgtggccagcctggtgagccccttccccaggcccgacctgatcagccagctggagaggggcgaggccccctgggaccccaacccctgggaggccgaggacctgaggggcatctgccccggcgag

SEQ ID NO: 19508 - RNA, 243 nt, synthetic construct
  source 1..243: mol_type = other RNA
taccagacccccgtgagcttcaaggacgtggtggtgggcttcacccaggaggagtggcacaggctgagccccgcccagagggccctgtacagggacgtgatgctggagacctacagcaacctggtgagcgtgggctacgagggcaccaagcccgacgtgatcctgaggctggagcaggaggaggccccctggatcggcggcgccgccaggcccggctgccactgctgggaggacatctggcag

SEQ ID NO: 19509 - RNA, 243 nt, synthetic construct
  source 1..243: mol_type = other RNA
cccctgaagctggtgaccttcgaggacgtggccgtggacttcacccaggaggagtggagcctgctggacaagagccagaagaacctgttcaggaacgtgatgatggagaccatccaccacctggtgagcgtgggctaccagatcagcaagagcgacgtgatcagccagctggagcagggcaaggagctgtggagcaaggccgccggcggcttccagggccagaggcccggcgagcaccagggc

SEQ ID NO: 19510 - RNA, 243 nt, synthetic construct
  source 1..243: mol_type = other RNA
caggccgaggtgaccttcgaggacgtggccgtgctgctgagcagggaggagtggggcaggctgggccccgtgcagaagggcctgtacagggacgtgatgctggagacctacaggaacctggtgagcctgggcgccggccccaccggccccaagcccgaggtgatcacccagctggagaggggcgacgagccctgggtgctggacgtgcagggcagggagggccccaccatcgacggcagcgcc

SEQ ID NO: 19511 - RNA, 243 nt, synthetic construct
  source 1..243: mol_type = other RNA
agccagggcctggtgaccttcggcgacgtggccatcgacttcagccaggaggagtgggagtggctgagccccatccagaggaacctgtacaggaaggtgatgctggagaactacaggaacctggccagcctgggcctgtgcgtgagcaagcccgacgtgatcagcctgctggagcagggcaaggagccctggaccgtgaagaggaggatgaccagggccaggtgccccgacacccagcacctg

SEQ ID NO: 19512 - RNA, 243 nt, synthetic construct
  source 1..243: mol_type = other RNA
ttccaggaggccgtgaccttcaaggacgtggccgtggccttcaccgaggaggagctgggcctgctggacagcgcccagaggaagctgtacagggacgtgatgctggagaacttcaggaacctggtgagcgtgggcaggcagagcttcaagcccgacatgatcagccagctggagagggaggagaagctgtggatgaaggagttccagacccagaggggcaggcacagcggcgacaggaaccag

SEQ ID NO: 19513 - RNA, 243 nt, synthetic construct
  source 1..243: mol_type = other RNA
atccagggcctgctgaccttcggcgacgtggccgtggccttcaccaggatcgagtggaggcacctggacgccgcccagagggccctgtacagggacgtgatgctggagaactacggcaacctggtgagcgtgggcctgctgagcagcaagcccaagctgatcgcccagctggagcagggcgccgagccctggatggaggtgagggaggcccccagcggcaccagggccgtgcccgactactgg

SEQ ID NO: 19514 - RNA, 243 nt, synthetic construct
  source 1..243: mol_type = other RNA
ttccaggagctggtgaccttcagggacgtggccatcgacttcagcggccaggagtgggagtacctggacccccaccagagggacctgtacagggacgtgatgctggagaactacaggaacctggtgagcctgggccacagcatcagcaagcccgtgctggtggacctgctggagcagggcaaggagccctggatgatcctgagggaggagacccagttccccggcaaggaggacaggggccac

SEQ ID NO: 19515 - RNA, 243 nt, synthetic construct
  source 1..243: mol_type = other RNA
ccccaggagcccgtgaccttcgaggacgtggccgtgtacttcacccagaaccagtgggccagcctggaccccatgcagagggccctgtacagggaggtgatgctggagaactacgccagcgtggccagcctggccttccccttccccaagcccgacctggtgagccagctggagaggggcgaggccccctggagccccgacccctgggaggccgaggtgctgaagggcacctgccccggcggc

SEQ ID NO: 19516 - RNA, 243 nt, synthetic construct
  source 1..243: mol_type = other RNA
atccaggagcccgtgaccttcaaggacgtggccgtggacttcacccaggaggagtggggcaggctggaccccgtgcagaggaccctgtacagggacgtgatgctggagacctacaggcacctgctgagcgtgggcaaccagatcgccaagcccgaggtgatcagcctgctggagcagggcgaggagccctggagcgtggagcaggcctacccccagagcacctgccccgccgtggacaccgag

SEQ ID NO: 19517 - RNA, 243 nt, synthetic construct
  source 1..243: mol_type = other RNA
gagcccggcgccgtgagcttcggcgacgtggccgtgtacttcagcagggaggagtggggctgcctgaggcccgcccagagggccctgtacagggacgtgatgagggagacctacagccacctgggcgccctgggcgtgggcggcagcaagcccgccctgatcagctggatggaggaggaggccgagctgtgggtgcccgccgcccaggaccccgaggtggccaagtgccccaccgaggccgac

SEQ ID NO: 19518 - RNA, 243 nt, synthetic construct
  source 1..243: mol_type = other RNA
gagagcgtggccttcgaggacgtggccgtgtacttcacccagaaccagtggggcagcctggaccccgcccagagggccctgtacagggaggtgatgctggagaactacgccaacgtggccagcctggtggccttccccttccccaagcccgccctgatcagccacctggagaagggcgaggccccctggggccccgacccctgggacgccgagatccccagcggcatcagccagggcggcgag

SEQ ID NO: 19519 - RNA, 243 nt, synthetic construct
  source 1..243: mol_type = other RNA
caggccgaggtgaccttcgaggacgtggccgtgctgctgagcagggaggagtggggcaggctgggccccgtgcagaagggcctgtacagggacgtgatgctggagacctacaggaacctggtgagcctgggcgccggccccgccggccccaagcccgaggtgatcacccagctggagaggggcgacgagccctgggtgcccgacgtgcagggcagggagaggcccaacatcgacggcagcgcc

SEQ ID NO: 19520 - RNA, 243 nt, synthetic construct
  source 1..243: mol_type = other RNA
agcctgggcagcgtgaccttcaccgacgtggccatcgacttcagccaggacgagtgggagtggctgaacctggcccagaggagcctgtacaagaaggtgatgctggagaactacaggaacctggtgagcgtgggcctgtgcatcagcaagcccgtggtgatcagcctgctggagcaggagaaggacccctgggtgatcaagggcggcatgaacaggggcctgtgccccgacctggagtgcgtg

SEQ ID NO: 19521 - RNA, 243 nt, synthetic construct
  source 1..243: mol_type = other RNA
atggccttcgaggacgtggccgtgtacttcagccaggaggagtggggcctgctggacaccgcccagagggccctgtacaggagggtgatgctggacaacttcgccctggtggccagcctgggcctgagcaccagcaggcccagggtggtgatccagctggagaggggcgaggagccctgggtgcccagcggcaccgacatgaccatgagcaggaacacccacaggaggaggaacagcggcttc

SEQ ID NO: 19522 - RNA, 243 nt, synthetic construct
  source 1..243: mol_type = other RNA
ttccaggacagcgtgaccttcgaggacgtggccgtgaggttcagcagcggcgagtggcagtgcctgaccagggcccagaggcacctgtacgccgacgtgatgctggagaactactggaacgtgatcagcgtgggcttcgccgtgcccaagccccccctgatcagccacctggagcagggcgccgagccctgcgtgcaggacctgcaggacggcggcttcctgagctgcagcttccccgtgagc

SEQ ID NO: 19523 - RNA, 243 nt, synthetic construct
  source 1..243: mol_type = other RNA
agccagggccacgtgaccttcgaggacatcgccgtgtacttcagccaggaggagtggggcctgctggacgaggcccagaggtgcctgtaccacgacgtgatgctggagaacttcagcctgatgaccagcgtggccggcctgagccagaacaaccacaaggacagctgcctgcagtggaaggtgcccgtgagcatgaacaacgtggcccagtgcagccccgacgaggtgcactacacccccatg

SEQ ID NO: 19524 - RNA, 243 nt, synthetic construct
  source 1..243: mol_type = other RNA
gccagggacctggtgatgttcagggacgtggccgtggacttcagccaggaggagtgggagtgcctgaacagctaccagaggaacctgtacagggacgtgatcctggagaactacagcaacctggtgagcctgggctgcagcatcagcaagcccgacgtgatcaccctgctggagcagggcaaggagccctggctggtggtgagggacgagaagaggaggtggagcctgggccccaccttcaag

SEQ ID NO: 19525 - RNA, 243 nt, synthetic construct
  source 1..243: mol_type = other RNA
ccccagggcctggtgaccttcggcgacgtggccgtggacttcagccaggaggagtgggagtggctgaaccccaaccagaggaccctgtacaggaaggtgatgctggagaactacaagaacctggccagcctgggcctgtgcgtgagcaagcccgacgtgatcagcagcctggagcagggcaaggagccctggaccgtgaagaggaagatgaccagggcctggtgccccgacctgaagatcgtg

SEQ ID NO: 19526 - RNA, 243 nt, synthetic construct
  source 1..243: mol_type = other RNA
agccagggcaggctgaccttccaggacgtggccatcgacttcacccaggaggagtgggagtgcctggacctgggccagagggagctgtacagggacgtgatgctggagaactacggcaacctggccagcctgggcctggtgatcagcaagcccgacctggtgaccttcctggagcagatgaaggacccctgggacaccaggaggatggagacccccgccgtgcaccccgccgtgagcagccac

SEQ ID NO: 19527 - RNA, 243 nt, synthetic construct
  source 1..243: mol_type = other RNA
cccagggagagcgtgaccttcgaggacgtggccgtgaacttcagccacgaggagtggcagtgcctgacccacagccagaggcacctgtacaaggacgtgatgctggagaactacggcaacatggtgagcctgggcttcagcttcagcaagccccccctgatcagctgcctggagcagggcgccgagagctacgtgcaggaccagcaggactgggagttcctgagctgcagctaccccgtgagc

SEQ ID NO: 19528 - RNA, 243 nt, synthetic construct
  source 1..243: mol_type = other RNA
caggccgaggtgaccttcgaggacgtggccgtgttcctgagccaggaggagtggggcctgctgggccccgcccagaagggcctgtacagggaggtgatgctggagacctacaggaacctggtgagcctgggcgccggcctggccggccccaagcccgaggtgatcgtgcacctggagaggggcgacgagctgtgggtgctggacatgaggggcgccgagcagcccagcgtggacggcagcgcc

SEQ ID NO: 19529 - RNA, 243 nt, synthetic construct
  source 1..243: mol_type = other RNA
aaggagctgcccagcgtgttcgaggacgtggccgtgtacttcaccagggaggagtggggcatgctggacaagaggcagaaggagctgtacagggacgtgatgaggatgaactacgagctgctggccagcctgggccccgccgccgccaagcccgacctgatcagcaagctggagaggagggccgccccctggatcaaggaccccaacggccccaagtggggcgagggccacccccccggcaag

SEQ ID NO: 19530 - RNA, 243 nt, synthetic construct
  source 1..243: mol_type = other RNA
atggccttcgaggacgtggccgtgtacttcagccaggaggagtggggcctgctggacaccgcccagagggccctgtacaggcacgtgatgctggagaacttcaccctggtgagcagcctgggcctgagcaccagcaggcccagggtggtggtgcagctggagaggggcgaggagccctgggtgcccagcaggatcgacagcacccccgccaggaacgcccagggcaggaggaaccccggcagc

SEQ ID NO: 19531 - RNA, 243 nt, synthetic construct
  source 1..243: mol_type = other RNA
agccacgagctgctgaccttcaaggacatcagcgtggacttcacccaggaggagtggggccagctggcccccgcctaccagaacctgtacagggaggtgatgctggagaactacagcaacctggtgagcgtggccggctaccagctgagcaagcccagcgtgatcagccagctggagaagggcgaggagccctggatggccgagaaggagggccccggcgaccccagcagcgacctgaagagc

SEQ ID NO: 19532 - RNA, 243 nt, synthetic construct
  source 1..243: mol_type = other RNA
accagccagagccccctgaccttcggcgacgtggccgtggagttcagcggcgaggagtgggcctggctggacagcgcccagaggagcctgcacaggagcgtgatgctggagaactacaggaacctggccagcctgggcaaggtgagcaagcccgagatgatcagcagcctggagcagaggaaggagccctgggccgtgaccaggaagaccaccggcggcgagtgcgccgacagccagaccctg

SEQ ID NO: 19533 - RNA, 243 nt, synthetic construct
  source 1..243: mol_type = other RNA
agccagggcctggtgaccttcggcgacgtggccgtggacttcagccaggaggagtgggcctggctgagcaccacccagaggaccctgtacaggaaggtgaccctggagaactacaggaacctggccagcctgggcctgtgcgtgagcaagcccgccgtgatcagcctgctggagcagggcaaggagccctggatcgtgaagaggaagatgaccaggggcggctgccccgacctgaacgccgtg

SEQ ID NO: 19534 - RNA, 243 nt, synthetic construct
  source 1..243: mol_type = other RNA
gcccaggagagcatgaccttcagggacgtggccgtgttcttcagccaggacgagtggctgcacctggacagcgcccagagggccctgtacagggaggtgatgctggagaactacagcaccctggtgagcctgggcatccccttcagcatgcccaaggtgatccaccagctgcagcagggccaggacccctgcaccgtggagggcgacgtgcccagcaacacctgcctgggcttcaagacctgg

SEQ ID NO: 19535 - RNA, 243 nt, synthetic construct
  source 1..243: mol_type = other RNA
tgctggggcctgctgagcttcaaggacatcagcatggagttcacctgggaggagtggcagctgctggacagcgcccagaagtacctgtacagggacgtgatcctggagaactacagccacctggtgagcctgggctaccacggcaccaagcccgacctgatcttcaagctggagcagggcgaggagccctggatgatcaacgccagggtgagcaggcagagctaccccgagggctggaaggag

SEQ ID NO: 19536 - RNA, 243 nt, synthetic construct
  source 1..243: mol_type = other RNA
caccaggaggtggtgaccttcgaggacgtggccgtgtacttcacccagaccgagtgggccggcctgagccccgcccagagggccctgtacaggagcgtgatgctggagatctacggcaacctgaccagcctgggctaccccgtgcccaagcccgagctggtgagcctgctggagaggggcgacctgcccgtgggcctggagacccaggacaacccccccgcccagggcaccagggacatctac

SEQ ID NO: 19537 - RNA, 243 nt, synthetic construct
  source 1..243: mol_type = other RNA
ttcgaggagctggtgaccttcgaggacgtggccgtgtacttcagcgagaacgagtggaccagcctggcccccacccagagggtgctgtacagggacgtgatgctggagaactacggcgccgtggccagcctggccgccttccccttccccaagcccgccctgatcagccagctggagaggggcgaggccccctggtgcaaggccccccagggcgccctggacggcgagggccccaggggcatc

SEQ ID NO: 19538 - RNA, 243 nt, synthetic construct
  source 1..243: mol_type = other RNA
ttccaggagcccgtgaccttcgaggacgtggccgtgtacttcacccagaaccagtgggccagcctggacagcgcccagagggccctgtacagggaggtgatgctggagaactacgccaacgtggccagcctggtgagccccttccccaggcccgacctgatcagccagctggagaggggcgaggccccctgggaccccgacccctgggaggccgaggacctgaggggcatctgccccggcggc

SEQ ID NO: 19539 - RNA, 243 nt, synthetic construct
  source 1..243: mol_type = other RNA
ttccaggaggccgtgaccttcaaggacgtggccgtggtgttcagcgaggaggagctgggcctgctggacagcacccagaggaagctgtacagggacgtgatgctggagaacttcaggaacctggtgagcgtgggccacagcagcagcaagcccgacatgatcagccagctggagagggaggaggagaagctgtacgtgaaggagatctgcaccgagaggggcaggcacagcgacaagaactgc

SEQ ID NO: 19540 - RNA, 243 nt, synthetic construct
  source 1..243: mol_type = other RNA
gcctacggcagcctgagcttcggcgaggtggccatcagcttcagccaggaggagtgggagtgcctggaccccgcccagagggccctgtacagggacgtgatgctggagacctacagcaacctggtgagcctggccggcagcagcatcagcaagcccgacgtgatcaccctgctggagcaggagaaggagccctgggtggtggtgaggagggagaccagcaggtggtaccccgacctggagagc

SEQ ID NO: 19541 - RNA, 243 nt, synthetic construct
  source 1..243: mol_type = other RNA
ccccaggtgctggtgagcttcgaggaggtggccgtgctgctgagccaggaggagtggggccacctgggccccgcccagaagaggctgtacagggacgtgatgctggagacctacggcaacctggtgagcctgggcctgcagggcagcaagcccgacgtgatcagcaagctggagcagggcgaggagccctgggccccccacagccccaggatcgagggcagctggatctggaggaggaggagg

SEQ ID NO: 19542 - RNA, 243 nt, synthetic construct
  source 1..243: mol_type = other RNA
cccctgaccttcgaggacgtggccctgtacttcagcgaggaggagtggctgatcatggaccccaaccagaggaccctgtacctggacgtgatgcaggagctgtacgagaacgtgaccagcctgggcctgaagctgaagaacgacaccggcaacgacccccccgtgagcctgcccaccctggagatccagcccagcggctgcgaggtggtgaggaaggccaccatgaaggacgccgagaccacc

SEQ ID NO: 19543 - RNA, 243 nt, synthetic construct
  source 1..243: mol_type = other RNA
gcccacgccctggtgaccttcagggacgtggccatcgacttcagccagaaggagtgggagtgcctggacaccacccagaggaagctgtacagggacgtgatgctggagaactacagcaacctggtgagcctgggctacagcggcagcaagcccgacgtgatcaccctgctggagcagggcaaggagccctgcgtggccgtgagggacgtgaccggcacccagtaccccggcctgctgagcagg

SEQ ID NO: 19544 - RNA, 243 nt, synthetic construct
  source 1..243: mol_type = other RNA
cccctggagagcgtgaccttcgaggacgtggccgtggacttcacccaggaggagtggagcctgctggacaagagccagaagaacctgttcaggaacgtgatgctggagaccgtgacccacctggtgagcgtgggctaccagatcagcaagagcgacgtgatcttccagctggagcagggcaaggagctgtggcccgaggccgccggcggcctgcagggccagagccccgacgaggtgaccccc

SEQ ID NO: 19545 - RNA, 243 nt, synthetic construct
  source 1..243: mol_type = other RNA
gcctgcgagagcatcaccttcggcgacgtggccatcgacttcagccaccaggagtgggagtacctgaacctggtgcagaagaccctgtaccaggaggtgatgatggagaactacgacaacctggtgagcctgggccacagcatcagcaagcccgacctgatcaccctgctggagcagggcaaggagccctggatgatcgtgggcgaggagaccaggggcgagtgcaccgacctggacagcagg

SEQ ID NO: 19546 - RNA, 243 nt, synthetic construct
  source 1..243: mol_type = other RNA
agccaggtgagcgtgaccttcgaggacgtggccgtgctgttcaccagggacgagtggaggaagctgggccccagccagaggaacgtgtaccaggaggtgatgctggagaactacagcaacctggtgagcctgggcctgctgttcagcaagcccagggtgatcagcctgctgcaggagggcgaggacccctggaaggtggagaaggagagccccggcggccccagcctgggctggaacagcagc

SEQ ID NO: 19547 - RNA, 243 nt, synthetic construct
  source 1..243: mol_type = other RNA
gtgcagggcagcgtgagcttcgaggacgtggccgtgggcttcagccaggaggagtggcagatcctgggccccagccagaaggccctgtactgggacgtgatgctggagaactactgcaacctggtgagcgtgggctaccaggcccccacccccaacagcctgttccagctggagcagggcggccccccctggaccgtggagggcgccgccctgagcagcacctgcagcggctaccaggccacc

SEQ ID NO: 19548 - RNA, 243 nt, synthetic construct
  source 1..243: mol_type = other RNA
ctgcagggcggcgtgaccttcgaggacgtggccgtggacttcacccaggaggagtggcagcagctgagccccgagcagaggggcctgtacagggacgtgaccctggagaactacaggaacctggccagcatgggcggcgaggacttcgccaagcccgaggtgatcctgaggctggagaacggcgaggagccctggatggtggagacccaggtgctgaggagctgcggccccgccgagaaggac

SEQ ID NO: 19549 - RNA, 243 nt, synthetic construct
  source 1..243: mol_type = other RNA
gccaggggcaagagcaagagcaaggcccccgtgaccttcggcgacctggccatctacttcagccaggaggagtgggagtggctgagccccatccagaaggacctgtacgaggacgtgatgctggagaactacaggaacctggtgagcctgggcctgagcttcaggaggcccaacgtgatcaccctgctggagaagggcaaggccccctggatggtggagcccgtgaggaggaggagggccccc

SEQ ID NO: 19550 - RNA, 243 nt, synthetic construct
  source 1..243: mol_type = other RNA
cagccccagggcaccatgaccttcaaggacgtggaggtgaccttcagccaggacgagtggggcctgctggacgccagccagaggaacctgtacagggacgtgatgctggagaactacggcaacatggccagcgtggtgggccccttcaccaagcccgccctgatcagctggctggaggccagggagccctggggcctgaacgtgcagggcgtgcagctgaagggcaaccccggcgccgccccc

SEQ ID NO: 19551 - RNA, 243 nt, synthetic construct
  source 1..243: mol_type = other RNA
ctgcaggagagcgtgaccttcagggacgtggccgtgctgttcagccaggacgagtggctgcacctggacagcgcccagaggaccctgtacagggaggtgatgctggagaactacaacaacctggccagcctgggcatccccttcagcatgcccaaggtgatctgccagctgcagcagggcgaggacccctgcaccgtggagggcgaggtgcccagcgacagctgcatcgacgccaagggccag

SEQ ID NO: 19552 - RNA, 243 nt, synthetic construct
  source 1..243: mol_type = other RNA
ttccaggagcccgtgaccttcgaggacgtggccgtgtacttcacccagaacgagtgggccagcctgcaccccacccagagggccctgtacaggggcgtgatgctggagaactacgccaacgtgaccagcctgagcgccttccccttccccaagcccgacctgatcttccagctggagcagggcgaggccgcctggggccccgacccctggaccctggacggcggcgaggccctgaggggcatg

SEQ ID NO: 19553 - RNA, 243 nt, synthetic construct
  source 1..243: mol_type = other RNA
gccagcgtgaccgtgaccttcgacgacgtggccctgtacttcagcgagcaggagtgggagatcctggagaagtggcagaagcagatgtacaagcaggagatgaagaccaactaccagaccctggacagcctgggctacgccttcagcaagcccgacctgatcacctggatggagcagggcaggatgctgttcatcagcgagcagggctgcctggacaagaccaggaggaccaccagccccccc

SEQ ID NO: 19554 - RNA, 243 nt, synthetic construct
  source 1..243: mol_type = other RNA
agccagagccccctgaccttcggcgacgtggccgtggagttcagcggcgaggagtgggcctggctggacagcgcccagaggagcctgcacaggagcgtgatgctggagaactacaggaacctggccagcctgggcctgtgcctgagcaagcccgagatgatcagcagcctggagcagaggaaggagccctgggccgtgaagaggaagctgaccggcggcgagtgccccgacagccagaccctg

SEQ ID NO: 19555 - RNA, 243 nt, synthetic construct
  source 1..243: mol_type = other RNA
caggagctgctgaccttcaaggacgtgagcgtggagttcagcatggacgagtgggcctgcctggaccccgcccagcagaccctgtaccaggacgtgatgctggagaactacaggcacctggtgttcctgggcctgaccctgagcaagcccgacctgatcacctgcctggagcagagcaaggagccctggaaggtgaagagccaccagaccgtggtgaagcaccccgccgtgagcgaccccccc

SEQ ID NO: 19556 - RNA, 243 nt, synthetic construct
  source 1..243: mol_type = other RNA
ttccagggcctgatgaccttcgaggacgtgaccgtggagttcacccagtgggagtggggccagctggaccccgcccagaaggacctgtacagggaggtgatgctggagaacttcaggaacctggccagcctgggcctgcccctgagcaagccctacgtgatctgccagctggaggagggccaggagccctgcatgctggagaaggagatcagcgtgggcacccagagcgtgggcgaggccacc

SEQ ID NO: 19557 - RNA, 243 nt, synthetic construct
  source 1..243: mol_type = other RNA
ttcaaggaggccgtgaccttcaaggacgtggccgtgaccttcaccgaggaggagctgggcctgctggaccccgcccagagggagctgtacagggacgtgatgctggagaacttcaggaacctggtgagcgtgggccaccagtgcttcatccccgacgtgatcagccagctggagagggaggagaagctgtggatgctgaggaccgccgcccagagcaggtgcagcagcggcgacaagaacctg

SEQ ID NO: 19558 - RNA, 243 nt, synthetic construct
  source 1..243: mol_type = other RNA
ccccccgagagcgtgaccttcgaggacgtggccgtgtacttcacccagaaggagtgggccagcctgatgcccgcccagaaggccctgtacagggacgtgatgctggagaactacgaggccgtggccttcctggcccccgccaccagcaagcccgccctgatcagccagctggagcagggcgtggagcccagcttcagccaggcccagggcgacctgagcatgagggacaggggcgccggcctg

SEQ ID NO: 19559 - RNA, 243 nt, synthetic construct
  source 1..243: mol_type = other RNA
ccccagaagctggtgaccttcgaggacgtggccgtgtacttcacccagaccgagtgggacggcctgagcaccgcccagagggccctgtacagggacgtgatgctggagaactacggcaacgtggccagcctgggcttccccctgctgaagcccgccgtgatcagccagctggagggcggcggcgagctggagggccccagcagcctggccagcggcgccggcaccggcccccagggcctgtgg

SEQ ID NO: 19560 - RNA, 243 nt, synthetic construct
  source 1..243: mol_type = other RNA
agcaggagccccctgaccttcggcgacgtggccgtggagttcagcggcgaggagtgggccaggctggacagcgcccagaggagcctgcacaggagcgtgatgctggagaactacaggaacctggccagcctgggcctgtgcatgagcaagcccgagatgatcagcagcctggagcagaggaaggagccctgggccgtgaagaggaagagcaccaggggcaggtgccccgacagccagaccgcc

SEQ ID NO: 19561 - RNA, 243 nt, synthetic construct
  source 1..243: mol_type = other RNA
ccccagaagagcgtgaccttcgaggacgtggccgtgtacttcacccaggccgagtgggacggcctgagccccgcccagaggaccctgtacagggacgtgatgctggagaactacggcaacgtggccagcctgggcttccccctgctgaagcccgccgtgatcagccagctggagggcggcggcgagctgggcggccccagccccctggccgccggcaccggcctgcacgtgctgaggaccgtg

SEQ ID NO: 19562 - RNA, 243 nt, synthetic construct
  source 1..243: mol_type = other RNA
ttccagaggagcgtgctgttcagcgacgtgagcatcgacttcagccccgaggagtgggagtacctggacctggagcagaaggacctgtacagggacgtgatgctggagaactacagcaacctggtgagcctgggctgcttcatcagcaagcccgacgtgatcagcctgctggagcagggcaaggagccctggaaggtggtgaggaagggcaggaggcagtaccccgacctggagaccaagtac

SEQ ID NO: 19563 - RNA, 240 nt, synthetic construct
  source 1..240: mol_type = other RNA
atgggcgagcccctggagttcagggacgtggccatcgagttcagcctggaggagtggcactgcctggacaccgcccagaggaacctgtacagggacgtgatgctggagaactacaggaacctggtgttcctgggcatcgccgtgagcaagcccgacctgatcacctggctggagcagggcaagaagcccctgaccgtgaagggccacgagatgatcgccaccccccccggcaggtgcaag

SEQ ID NO: 19564 - RNA, 243 nt, synthetic construct
  source 1..243: mol_type = other RNA
gcccaggagagcgtgaccttcgaggacgtggccgtgaacttcaccgacagggagtggcagtgcctgacctacgcccagaggcacctgtacaaggacgtgatgctggagaactacggcaacatggtgagcgtgggcttccccttccccaagccccccctgatcagccacctggagaggggcgtggagctgtgcgtgcaggacccccaggacagggagagcctgagctgcagctgcctggtgagc

SEQ ID NO: 19565 - RNA, 243 nt, synthetic construct
  source 1..243: mol_type = other RNA
ttccagcacctggtgatgttcagggacgtggccgtggacttcagccaggaggagtgggagtgcctgaacagctaccagaggaacctgtacagggacgtgatcctggagaactacagcaacctggtgagcgtgggctgcaccatcagcaagcccgacgtgatcaccctgctggagcagggcaaggagccctggatggtggtgagggacgagaggaggaggaggagcctggacctggaggccagg

SEQ ID NO: 19566 - RNA, 243 nt, synthetic construct
  source 1..243: mol_type = other RNA
atggtgagcttcgaggacgtggccgtgcccctgagccaggaggagtggaactgcctgatccccgcccagaggggcctgtacagggacgtgatgctggagacctacggcaacctggtgagcctgggcctgcaggccagcaagcccgacgtgatcagcaggctggagcagggcgacgagccctggaccccccacatcctgaggacccagggcagctggagctggaggcacaagagggagggctac

SEQ ID NO: 19567 - RNA, 243 nt, synthetic construct
  source 1..243: mol_type = other RNA
aggcccgagagcgtgaccttcgaggacgtggccgtgtacttcagcgagaacgagtggatcggcctgggccccgcccagagggccctgtacagggacgtgatgctggagaactacggcgccgtggccagcctggccgccttccccttccccaagcccgccctgatcagccagctggagaggggcgaggccccctggtgcagcgtgccctggggcgccctggacggcgaggaccccaggagcatc

SEQ ID NO: 19568 - RNA, 243 nt, synthetic construct
  source 1..243: mol_type = other RNA
gagcccggccccgtgaccttcggcgacgtggccgtgtacttcagcagggaggagtggggctgcctgaggcccgcccagagggccctgtacagggacgtgatgagggagacctacagccacctgggcgccctgggcgtggagggcagcaagcccgccctgatcagctgggtggaggaggaggccgagctgtggggccccgccgcccaggaccccgaggtggccaagaggcccaccgaggccgac

SEQ ID NO: 19569 - RNA, 243 nt, synthetic construct
  source 1..243: mol_type = other RNA
agccacggccccctgagcttcgaggacgtggccgtggccttcaccaaggaggagtggcagcagctggaccccgcccagaggaccctgtacagggacgtgatgctggagaacttcagccacgtgatcagcctgggccaccccgtgagcaagcccgacgtgatcagcaagctggagcagggcgaggagccctggatcatcaagagggacgtgagcgactggatctaccccgagagggagaccagg

SEQ ID NO: 19570 - RNA, 243 nt, synthetic construct
  source 1..243: mol_type = other RNA
gcccaggagagcgtgaccttcgaggacgtggccgtgaacttcaccaacagggagtggcagagcctgacctacgcccagaggcacctgtacaagcacgtgatgctggagaactacaggaacatggtgagcctgggcttccccttccccaagccccccctgatcagccacctggagaggggcgtggagccctgcgtgcaggacccccaggacaaggagagcctgagctgcagctaccccgtgagc

SEQ ID NO: 19571 - RNA, 243 nt, synthetic construct
  source 1..243: mol_type = other RNA
caccaggagagcctgaccttcaaggacgtggccgtgaacttcacccaggaggagtggcaccacgtggacgccgcccagaggaggctgtacaaggacgtgatgctggagaactacagccacctggtgagcctgggctaccaggtgagcaagcccgaggtgatcttcaagctggagcagggcgaggagccctggatcgccgagggcgagatccagaggcccgtgtgccccgactggaagaccagg

SEQ ID NO: 19572 - RNA, 243 nt, synthetic construct
  source 1..243: mol_type = other RNA
agccaggagagcgtgagcttcaaggacgtgaccgtgggcttcacccaggaggagtggcagcacctggaccccagccagagggccctgtacagggacgtgatgctggagaactacagcaacctggtgagcgtgggctactgcgtgcacaagcccgaggtgatcttcaggctgcagcagggcgaggagccctggaagctggaggaggagttccccagccagagcttccccgaggtgtggaccgcc

SEQ ID NO: 19573 - RNA, 243 nt, synthetic construct
  source 1..243: mol_type = other RNA
gcccaggagagcgtgatgttcagcgacgtgagcatcgacttcagccaggaggagtgggagtgcctgaacgacgaccagagggacctgtacagggacgtgatgctggagaactacagcaacctggtgagcatggccggccacagcatcagcaagcccaacgtgatcagctacctggagcagggcaaggagccctggctggtggacagggagatcaccagcggccagtggcccgtgctggagagc

SEQ ID NO: 19574 - RNA, 243 nt, synthetic construct
  source 1..243: mol_type = other RNA
atggccttcgaggacgtggccgtgtacttcagccaggaggagtggggcctgctggacaccgcccagagggccctgtacaggcacgtgatgctggagaacttcaccctggtgaccagcctgggcctgagcaccagcaggccctacgtggtgatccagctggagaggggcgaggagccctgggtgcccagcggcaaggacatgaccctggccaggaacacctacaggaggctgaacgccggcagc

SEQ ID NO: 19575 - RNA, 243 nt, synthetic construct
  source 1..243: mol_type = other RNA
caccaggacctggtgaccttcaaggacgtggccgtgtacttcacccagaccgagtgggccggcctgagccccgcccagaaggccctgtacaggagcgtgatgctggagaactacggcaacctgaccagcctgggctaccccgtgcccaagcccgccctgatcagcctgctggagggcggcaacctgccctggggcctggaggcccaggacaaccccagcgccgagaggaccaaggacatctgc

SEQ ID NO: 19576 - RNA, 243 nt, synthetic construct
  source 1..243: mol_type = other RNA
agcctgggcagcgagctgttcagggacgtggccatcgtgttcagccaggaggagtggcagtggctggcccccgcccagagggacctgtacagggacgtgatgctggagacctacagcaacctggtgagcctgggcctggccatcagcaagcccgacgtgatcagcttcctggagcagggcagggagccctggatggtggagagggtggtggccggcggcctgtgccccgtgctggagagcagg

SEQ ID NO: 19577 - RNA, 243 nt, synthetic construct
  source 1..243: mol_type = other RNA
ttccaggagcccgtgaccttcgaggacgtggccgtgtacttcacccagaacgagtggaccagcctgcagcccagccagagggccctgttcagggaggtgatgctggagaactacgccaccgtgaccagcctgagcgccttccccttccccaagcccgacctgatcttcaggctggagcagggcgaggccgcctggggccccgacccctggaccctggccggcgaggaggccctgaggggcctg

SEQ ID NO: 19578 - RNA, 243 nt, synthetic construct
  source 1..243: mol_type = other RNA
taccagacccccgtgagcttcaaggacgtggtggtgggcttcacccaggaggagtggcacaggctgagccccgcccagagggccctgtacagggacgtgatgctggagacctacagcaacctgctgagcgtgggctacgagggcaccaagcccgacgtgatcctgaggctggagcaggaggaggccccctggatcggcgaggccgcctgccccggctgccactgctgggaggacatctggcag

SEQ ID NO: 19579 - RNA, 243 nt, synthetic construct
  source 1..243: mol_type = other RNA
gacgaggccctgatggccttcaaggacgtggccgtggccttcacccagaaggagtggaagctgctgagccccgcccagaggaccctgtacagggacgtgatgctggagaactacagccacatggtgagcctgggcatcgccttccccaagcccaagctgatcacccagctggagcagggcgaggagccctggagggaggagagcgagagcctgctggacctgtgccccgccgagcccaggacc

SEQ ID NO: 19580 - RNA, 243 nt, synthetic construct
  source 1..243: mol_type = other RNA
caggcccaggagaccctgaccttcgaggacgtggccgtggacttcacctgggaggagtggcagctgctggcccccccccagaaggacctgtacagggacgtgatgctggagaactacagcaacctgctgagcgtgggcttccaggccagcaagcccaacgtgctgagcaagctgggccagggcgagccctggaccatggaggacgagatccactgccagaccaggagcgagatctggaaggtg

SEQ ID NO: 19581 - RNA, 243 nt, synthetic construct
  source 1..243: mol_type = other RNA
ccccaggagcccgtgaccttcgaggacgtggccgtgtacttcacccagaaccagtgggccagcctggaccccacccagagggccctgtacagggaggtgatgctggagaactacgccagcgtggccagcctggtggtgttccccttccccaagcccgacctggtgagccagctggagagggaggaggccccctggggccccgacccctgggaggccgaggtgctgaggggcatctgccccggc

SEQ ID NO: 19582 - RNA, 243 nt, synthetic construct
  source 1..243: mol_type = other RNA
agccaggagcccgtgaccttcgaggacgtggccgtgtacttcacccagaaccagtgggccagcctggaccccatgcagagggccctgtacctggaggtgatgctggagaactacgccaacatcaccagcctggccgccctgcccttccccaagcccgacctgatcctgcagctggagcagggcgaggccccctgggacctggacccctggacccccctggagggcgaggccctggagggcgtg

SEQ ID NO: 19583 - RNA, 243 nt, synthetic construct
  source 1..243: mol_type = other RNA
agcctggagagcgtgaccttccaggacgtggccgtgaacttcacccaggaggagtggggccacctggagcccgcccagaaggacctgtacagggaggtgatgctggagaactaccagaacttcgtgagcctgggcctgcccttcagcaagccccacgtgatcagccagctggagaggggcgaggccccctggatcaccgagagggacgtgcccagggtgagctgccaggacttcttcatccag

SEQ ID NO: 19584 - RNA, 243 nt, synthetic construct
  source 1..243: mol_type = other RNA
gcccaggagagcgtgatgttcagcgacgtgagcgtggacttcagccaggaggagtgggagtgcctgaacgacgaccagagggacctgtacagggacgtgatgctggagaactacagcaacctggtgagcatgggccacagcgtgagcaagcccaacgtgatcagctacctggagcagggcaaggagccctggctggtggacagggagctgaccaggggccagtggcccgtgctggagagcagg

SEQ ID NO: 19585 - RNA, 243 nt, synthetic construct
  source 1..243: mol_type = other RNA
agctacggcagcttcagcttcgaggacgtgaccgtgggcttcacccaggaggagtggcagcacctgggccccgcccagaggatcctgtacagggacgtgatgctggagaactacagccacctggtgagcgtgggctgctgcatccccaagcccgaggtgatcctgaagctggagcagggcgagcagccctggatcctggaggaggagagccccagccagagctaccccggcctgcccaccgac

SEQ ID NO: 19586 - RNA, 243 nt, synthetic construct
  source 1..243: mol_type = other RNA
gcccaccacctggtgatgttcagggacgtggccgtggacttcagcaaggaggagtgggagtgcctgaacagctaccagaggaacctgtacagggacgtgatcctggagaactacagcaacctggtgagcgtggccggctgcagcatcagcaagcccgacgtgatcaccctgctggagcagggcaaggagccctggatggtggtgagggacgagaggaggaggaggagcctggacctggagagc

SEQ ID NO: 19587 - RNA, 243 nt, synthetic construct
  source 1..243: mol_type = other RNA
caccaggaggtggtgaccttcgaggacgtggccgtgtacttcacccagaccgagtgggccggcctgagccccgcccagagggccctgtacaggagcgtgatgctggagatctacggcaacctgaccagcctgggctaccccgtgcccaagcccgccctggtgagcctgctggagaggggcgacctgccctggggcctggagaccagggacgacccccccgcccagggcaccaaggacatctgc

SEQ ID NO: 19588 - RNA, 243 nt, synthetic construct
  source 1..243: mol_type = other RNA
tgccaggagaccctgaccttcaaggacgtggccgtggacttcaccagggaggagtggggccacctgggccccgcccagagggacctgtacaaggaggtgatgctggacaactacaggaacctggtgagcctgggcctgcaggtgagcaagcccgacgtgatcttccagctggagaggggcgagagccccagcatgctggagggcaaggacagcagcgacccctgccccgagttcctgagccag

SEQ ID NO: 19589 - RNA, 243 nt, synthetic construct
  source 1..243: mol_type = other RNA
agcaaggtgcccgtgaccttcggcgacctggccatctacttcagccaggaggagtgggagtggctgagccccatccagaaggacctgtacgaggacgtgatgctggagaactaccagaacctggtgagcctgggcctgagcttcaggaggcccaacgtgatcaccctgctggagaagggcaaggccccctggatggtggagcccgccaggaagaggaggggcgtggacagcggcagcaagtgc

SEQ ID NO: 19590 - RNA, 243 nt, synthetic construct
  source 1..243: mol_type = other RNA
ccccaggtgctggtgagcttcgaggacgtggccgtgttcctgagcagggaggagtggggctgcctgggccccgcccagaggggcctgtacagcaacgtgatgctggagacctacaggaacctgatcagcctgggcctgcagggcagcaagcccgacgtgatcagcaggctggagaagggcgaggagccctgggccccctacagccccaagatcgaggagggctggatcaggagccacaggagc

SEQ ID NO: 19591 - RNA, 243 nt, synthetic construct
  source 1..243: mol_type = other RNA
atggccttcgaggacgtggccgtgtacttcagccaggaggagtggggcctgctggacaccacccagagggccctgtacaggcacgtgatgctggagaacttcaccctggtgaccagcctgggcctgagcaccagcaggccccacgtggtgatccagctggagaggggcgaggagccctgggtgcccagcggcaccgacaccaccctgagcaggaccacctacaggaggaggaaccccggcagc

SEQ ID NO: 19592 - RNA, 243 nt, synthetic construct
  source 1..243: mol_type = other RNA
caggccgaggtgaccttcgaggacgtggccgtgctgttcagcagggaggagtggggcaggctgggccccgcccagaggggcctgtacagggacgtgatgctggagacctacaggaacctggtgagcctgggcgccggccccgccggccccaagcccggcgtgatcacccagctggagaggggcgacgagccctgggtgctggacgcccagggcaccgagggcaaggagaggctgagggtgagc

SEQ ID NO: 19593 - RNA, 243 nt, synthetic construct
  source 1..243: mol_type = other RNA
gcccaggtgctggtgaccttccaggacgtggccgtggacttcacccaggaggagtggaggctgctggacctgggccagaaggagctgtacaaggaggtgatgctggagaacgtgcagaacatgctgttcctgggcctgcccgtgcccagggaggactggatcagccacttcgaccagggcagggccccctggatgctggagggcgagggccccagcaacagcaggctggacggccagaggagg

SEQ ID NO: 19594 - RNA, 243 nt, synthetic construct
  source 1..243: mol_type = other RNA
ttccaggagcccgtgaccttcgaggacgtggtggtgtacttcacccagaacgagtggaccagcctgcagcccagccagagggccctgtacagggaggtgatgctggagaactacgccaccgtgaccagcctgagcgccttccccttcagcaagcccgacctgatcttcaggctggagcagggcgaggccgcctggggcagcgacccctggaccctggccggcgaggaggcccccaggggcctg

SEQ ID NO: 19595 - RNA, 243 nt, synthetic construct
  source 1..243: mol_type = other RNA
caccaggaggtggtgaccttcgaggacgtggccgtgtacttcacccagaccgagtgggccggcctgagccccgcccagagggccctgtacaggagcgtgatgctggagatctacggcaacctgaccagcctgggctaccccgtgcccaagcccgccctggtgagcctgctggagaggggcgacctgccctggggcctggagaccagggacgacaggcccgcccagggcaccaaggacatctgc

SEQ ID NO: 19596 - RNA, 243 nt, synthetic construct
  source 1..243: mol_type = other RNA
gccagggccagcctgagcttcgaggacgtggccgtgggcttcagctgggaggagtggcagctgctggcccccagccagaaggacctgtacagggacgtgatgctggagaactacaggaacctggtgagcgtgggctacgaggccagcaagcccgacagcgtgttccagctggagcagggcgagcccccctggatggtggagggcgccgcccagagccagacctgccaggaggagatctgggag

SEQ ID NO: 19597 - RNA, 243 nt, synthetic construct
  source 1..243: mol_type = other RNA
aaggaccagggcagcctgaccctggaggacgtggccgtggacttcacctgggaggagtggcagctgctggcccccgcccagaaggacctgtacagggacgtgatgctggagaactacagcaacctgctgagcatcggctaccaggccagcaagcccgacgccctgagcaggctggagaggggcgagccctggcccgtggaggacgagatccacagccagatctgccccgagatgaggaaggac

SEQ ID NO: 19598 - RNA, 243 nt, synthetic construct
  source 1..243: mol_type = other RNA
ccccaggccagcgtgagcttcaaggacgtgaccgtggagttcacccaggaggagtggtggcagatggacagcgcccagaggaccctgtacagggacgtgatgctggagaactacagccacctggtgagcgtgggctactgcttcaccaagcccgagctgatcttcatgctggagcagggcgaggacccctggctgctggagaaggagttcgtgaacaggagcagccccgaggagagccagccc

SEQ ID NO: 19599 - RNA, 243 nt, synthetic construct
  source 1..243: mol_type = other RNA
gccagggccagcctgagcttcgaggacgtggccgtgggcttcagctgggaggagtggcagctgctggcccccagccagaaggacctgtacagggacgtgatgctggagaactacaggaacctggtgagcgtgggctaccaggccagcaagctggacagcctgttccagagcgagcagggcggccccccctggaccgtggagggcgccgcccagagccagacctgccccgaggagatctgggag

SEQ ID NO: 19600 - RNA, 243 nt, synthetic construct
  source 1..243: mol_type = other RNA
atggtgagcttcgaggacgtggccgtgctgctgagccaggaggagtgggactgcctgatccccgcccagaggggcctgtacagggacgtgatgctggagacctacggcaacctggtgagcctgggcctgcaggccagcaagcccgacgtgatcagcaggctggagcagggcgacgagccctggaccccccacatcctgaggacccagaggagctggagctggaggcacaagagggagtgctac

SEQ ID NO: 19601 - RNA, 243 nt, synthetic construct
  source 1..243: mol_type = other RNA
ctgcagaagagcgtgaccttcgaggacgtggccgtgtacttcacccagaccgagtgggacggcctgagccccgcccagagggccctgtacagggacgtgatgctggagaactacggcaacgtggccagcctgggcttcagcctgttcaagcccgccgtgatcagccagctggagggcgccggcgagctgggcggccccagccccctggtggacggcaccgagaccggcccccagggcctgtgg

SEQ ID NO: 19602 - RNA, 243 nt, synthetic construct
  source 1..243: mol_type = other RNA
agccagagcctggtgaccttcggcgacgtggccgtggacttcagccaggaggagtgggagaggctgaacagcgcccagaggggcctgtacagggacgtgatgctggagaactacaggagcctggtgagcctgggcctgtgcttcagcaagcccgacatgatcagcagcctggagcagaggaaggagccctggatgcccaagaggaagctgatgaggggccagtgccccggctggaaggccgtg

SEQ ID NO: 19603 - RNA, 243 nt, synthetic construct
  source 1..243: mol_type = other RNA
ctgaaggacctggtgaccttcaaggacgtggccatcgacttcagccaggaggagtggcagtggatgaaccccgcccagaagcacctgtacaggagcatgatgctggagaactaccagagcctggtgagcctgggcctgtgcatcagcaagccctacgtgatcagcctgctggagcagggcagggagccctgggagatgaccagcgagatgaccaggagccccttcagcgactgggagagcatc

SEQ ID NO: 19604 - RNA, 243 nt, synthetic construct
  source 1..243: mol_type = other RNA
agccagagcctggtgaccttcggcgacgtggccgtggacttcagccaggaggagtgggagtggctgaacagcgcccagaggaacctgtacaggagcgtgatgctggagaactacaggaacctggtgagcctgggcctgtgcgtgagcaagcccgacatgatcagcagcctggagcagaggaaggagccctggatggtgaagaggaagctgaccaggggcaggtgccccgacctgaagaccgtg

SEQ ID NO: 19605 - RNA, 243 nt, synthetic construct
  source 1..243: mol_type = other RNA
caccaggaggtggtgaccttcgaggacgtggccgtgtacttcacccagaccgagtgggccggcctgagccccgcccagagggccctgtacaggagcgtgatgctggagatctacggcaacctgaccagcctgggctaccccgtgcccaagcccgccctggtgagcctgctggagaggggcgacctgccctggggcctggagacccaggacgacccccccgcccagggcaccaagcacatctgc

SEQ ID NO: 19606 - RNA, 243 nt, synthetic construct
  source 1..243: mol_type = other RNA
aggcccagggccgtgaagttcggcgacgtggccctgtacttcagcagggaggagtggggctgcctgaggcccgcccagagggccctgtacagggacgtgatgcaggagacctacggccacctgggcgccctgggctgcgccggccccaagcccgccctgatcagctggctggagaggaacaccgacgactgggagcccgccgccctggacccccaggagtgccccaagggcgtggccgtgcag

SEQ ID NO: 19607 - RNA, 243 nt, synthetic construct
  source 1..243: mol_type = other RNA
agcgaggacctggtgaccttcagggacgtggccgtggacttcagccaggaggagtgggagcagctgaacagcgcccagaggggcctgtacagggacgtgatgctggagaactacaggagcctggtgagcctgggcgtgagcgtgagcaagcccgacgtgatcagcctgctggagcagggcaaggagccctgggtggtgaaggagggcaccaggggcacctacagcgactggaagtacgccttc

SEQ ID NO: 19608 - RNA, 243 nt, synthetic construct
  source 1..243: mol_type = other RNA
agccaggagcccgtgaccttcgccgacgtggccgtggtgttcacccccgaggagtgggtgttcctggacagcacccagaggagcctgtacagggacgtgatgctggagaactacaggaacctggccagcgtggccggcgaccagctgaggaagcccaacgccagcagcgacctggagcagaggggcgagcagtggaacaccgagaggggcgtgatcagcgacacctgccccgagccccagctg

SEQ ID NO: 19609 - RNA, 243 nt, synthetic construct
  source 1..243: mol_type = other RNA
ccccaggtgctggtgagcttcgaggaggtggccgtgctgctgagccaggaggagtggggcaggctgagccccgcccagaagggcctgtacagggacgtgatgatggagacctacggcaacctggtgagcctgggcctgcagggcagcaagcccgacgtgatcagcaagctggagcagggcaaggagccctgggccccccacagccccaggatcgagggcagctggatctggaggaggaggagg

SEQ ID NO: 19610 - RNA, 243 nt, synthetic construct
  source 1..243: mol_type = other RNA
ccccagggcagcctgaccttcagggacgtggccatcgagttcagccaggaggagtggaagtgcctggaccccatccagaaggccctgtacagggacgtgatgctggagaactacaggaacctgggcttcctgggcctgtgcctgcccgacctgaacatcatcagcatgctggaggagggcaaggagccctggaccgtggtgagccaggtgaagatcgccaggaaccccaactggggcgagtgc

SEQ ID NO: 19611 - RNA, 243 nt, synthetic construct
  source 1..243: mol_type = other RNA
gtgcacggcagcgtgaccttcagggacgtggccatcgacttcagccaggaggagtgggagtgcctgcagcccgagcagaggaccctgtacagggacgtgatgctggagaactacagccacctgatcagcctgggcagcagcatcagcaagcccgacgtgatcaccctgctggagcaggagaaggagccctggatggtggtgaggaaggagaccagcaggtggtaccccgacctggagagcaag

SEQ ID NO: 19612 - RNA, 243 nt, synthetic construct
  source 1..243: mol_type = other RNA
gtgcacggcagcgtgaccttcagggacgtggccatcgacttcagccaggaggagtgggagtgcctgcagcccgaccagaggaacctgtacagggacgtgatgctggagaactacagccacctgatcagcctgggcagcagcatcagcaagcccgacgtgatcaccctgctggagcaggagaaggagccctggatcgtggtgaggaaggagaccagcaggtggtaccccgacctggagagcaag

SEQ ID NO: 19613 - RNA, 243 nt, synthetic construct
  source 1..243: mol_type = other RNA
atggccgccagccaggagagcctgaccttcaaggacgtgagcgtggacttcagcctggaggagtgggagtgcctggaccccgcccagaggaagctgtacagcgacgtgatgctggagaactacagcaacctggtgagcctgggcctggtggtgagcaagcccggcctggtgaccttcctggagcagatgcaggaggtgtgggacgtgagcaggaagaagagcatcagcaccccccccggcagg

SEQ ID NO: 19614 - RNA, 243 nt, synthetic construct
  source 1..243: mol_type = other RNA
gcccaggagagcctgaccctggaggacgtggccgtggacttcagcagggaggagtggaggctgctggcccccgcccagaaggacctgtacagggacgtgatgctggagaacttcaggaacctggtgagcgtgggccaccaggccagcaagcccgacgtgctggccaagctggagaggggcgaggagccctgggccatcgaggaggaggtgaggagcggcaccagccccgagaccggcaaggtg

SEQ ID NO: 19615 - RNA, 243 nt, synthetic construct
  source 1..243: mol_type = other RNA
ccccagaagagcgtgaccttcgaggacgtggccgtgtacttcacccagaccgagtgggacggcctgagccccgcccagagggccctgtacagggacgtgatgctggagaactacggcaacgtggccagcctgggcttcagcctgctgaagcccgccgtgatcagccagctggagggcgccggcgagctggagggccccagccccctggtggccggcaccgagatcggcccccagggcctgtgg

SEQ ID NO: 19616 - RNA, 243 nt, synthetic construct
  source 1..243: mol_type = other RNA
ctgctgaccttcgaggacgtggccgtgagcttcagcgaggaggagtggaagctgctggaccccagccagaagatcctgtacaacgacgtgatgcaggagaactacgagaccgtgatcagcctgggcctgaagctgaagaacgacaccggcaacgaccagcccatcagcctgagcgccctggagatccaggccagcggcggcaaggtgctgaggaaggccaggatgaaggtggcccagaagacc

SEQ ID NO: 19617 - RNA, 243 nt, synthetic construct
  source 1..243: mol_type = other RNA
gcccaccacctggtgatgttcagggacgtggccgtggacttcagccaggaggagtgggagtgcctgaacccctaccagaggaacctgtacagggacgtgatcctggagaactacagcaacctggtgagcgtggccggctgcagcatcagcaagcccgacgtgatcaccctgctggagcagggcaaggagccctggatggtggtgagggacgagaggaggaggagcctggacctggagagcagg

SEQ ID NO: 19618 - RNA, 243 nt, synthetic construct
  source 1..243: mol_type = other RNA
gtgcaggagagcgtgaccttcaaggacgtggccgtgctgttcacccaggacgagtgggcccagctgagccccgcccagagggccctgtacagggacgtgatgctggagaactacagcaacctggtgagcctgggcctgctgggccccaagcccgacgtgttcagccagctgggcaagggcgaggagtggatgcccgaggacagcctgggcggcttctgcctggactggatgaccacccccgtg

SEQ ID NO: 19619 - RNA, 243 nt, synthetic construct
  source 1..243: mol_type = other RNA
ttccaggacagcgtgaccttcgaggacgtggccgtgaggttcagcagcggcgagtggcagtgcctgaccagggcccagaggcacctgtacgccgacgtgatgctggagaactacggcaacatgatcagcgtgggcttcgccgtgcccaagccccccctgatcagccacctggagcagggcgccgagccctgcgtgcaggacctgcaggacggcggcttcctgagctgcagcttccccgtgagc

SEQ ID NO: 19620 - RNA, 243 nt, synthetic construct
  source 1..243: mol_type = other RNA
agccaggagcccgtgaccttcgaggacgtggccgtgtacttcacccagaaccagtgggccaacctggacttcacccagagggccctgtacagggaggtgatgctggagaactacgccaacgtggccagcctggccttccccttccccaagcccgacctggtgagccagctggagaggggcgaggccccctggggccccgacccctgggaggccgaggtgctgaggggcgtgtgccccggcggc

SEQ ID NO: 19621 - RNA, 243 nt, synthetic construct
  source 1..243: mol_type = other RNA
acccagggcagcctgagcttcagggacgtgaccgtgggcttcacccaggaggagtggcagcacctggaccccgcccagaggagcctgtacagggacgtgatgctggagaactacagccacctggtgagcctgggctacagcatcagcaagcccgaggtgatcctgaagctggagcagggcgaggagccctggatcctggaggaggagttccccagccagagcgacctggagctgatcaagagc

SEQ ID NO: 19622 - RNA, 243 nt, synthetic construct
  source 1..243: mol_type = other RNA
gcccacggcagcgtgatcttcagcgacgtgagcatcgccttcagccaggaggagtgggagtacctggacctggagcagagggacctgtacagggacgtgatgctggagaactacagcaacctggtgagcctgggctgcttcatcagcaagcccaacgtgatcagcctgctggagcagggcaaggagccctggaaggtggtgaggaaggagaggaggtaccccgacatgggcatcaggtacgag

SEQ ID NO: 19623 - RNA, 243 nt, synthetic construct
  source 1..243: mol_type = other RNA
cccgagaacggcgtgaccttcgaggacatcgccctgtacttcagctgggaggagtggaagctgctggacgaggcccagaggaggctgtaccacgacgtgatgctggagaacttcgccctgatcagcagcctgggcgtgtggagcggcgaggagaacgtggaggccagcttcgagcagagcgtgagcgtggtgatgagccaggtgaggaccagcaaggagcccagcagcagccagaagacccac

SEQ ID NO: 19624 - RNA, 243 nt, synthetic construct
  source 1..243: mol_type = other RNA
tggaaggaggagctgagcttcgaggacgtggccgtgaacttcaccagggaggagtggaacaagctggactggacccagagggacctgtacagggacgtgatgctggagaactacaggaacatgatcctgctgggcttccagttccccaagcccgaggtgatctgccagctggagcagtgggaggacccctggatcctggacctgcccagggccggcaccaggaaggccagcagcaacgcctgc

SEQ ID NO: 19625 - RNA, 243 nt, synthetic construct
  source 1..243: mol_type = other RNA
atgggcaggctgatgttccaggacgtggccatcgacttcacccaggaggagtgggagtgcctggacctgagccagagggacctgtacagggacgtgatgctggagacctacggcaacctggccagcctgggcctggtggtgagcaagcccgacctggtgaccttcctggagcagatgaagaacccctgggacgtgaggaggaccgacaccaaggccacctaccccgccgtgagcagccacaac

SEQ ID NO: 19626 - RNA, 243 nt, synthetic construct
  source 1..243: mol_type = other RNA
tgcgaggtgagcgtgagcttcgaggacgtgaccgtggacttcagcagggaggagtggcagcacctggaccccgcccagaggaggctgtacagggacgtgaccctggagaactacagccacctgtgcagcgtgggctaccaggtgcccaagcccgaggtgatcttcaagctggagcagggcgagggcccctggaccctggaggaggagaccccccaccagagctgcagcgacgaggacatgggc

SEQ ID NO: 19627 - RNA, 243 nt, synthetic construct
  source 1..243: mol_type = other RNA
agcaaggcccccgtgaccttcggcgacctggccatctacttcagccaggaggagtgggagtggctgagccccatccagaaggacctgtacgaggacgtgatgctggagaactaccagaacctggtgagcctgggcctgagcttcaggaggcccaacgtgatcaccctgctggagaagggcaaggccccctggatggtggagcccgtgaagaggaggaggggcctggacctgggcagcaagtgc

SEQ ID NO: 19628 - RNA, 243 nt, synthetic construct
  source 1..243: mol_type = other RNA
aagcccctggccgtgaggttcgccgacgtggccgtgtacttcagccccgaggagtggggctacctgaggcccgcccagagggccctgtacagggacgtgatgcaggagacctacggccacctgggcgccctgggcttccccggccccaagcccgccctgatcagctggatggagcaggagagcgaggcctggagccccgccgcccaggaccccgaggagggcgagaacctgggcggcgccctg

SEQ ID NO: 19629 - RNA, 243 nt, synthetic construct
  source 1..243: mol_type = other RNA
gcccaggagaccgtgaccttcaaggacgtggccgtggacttcacccaggaggagtggggccagctggaccccgtgcagaggaccctgtacagggacgtgatgctggagacctacggccacctgctgagcgtgggcaaccagatcgccaagcccgaggtgatcagcctgctggagcagggcgaggagccctggagcatggacagggtgtaccccccccagaggacctgccccgagtggatgagg

SEQ ID NO: 19630 - RNA, 243 nt, synthetic construct
  source 1..243: mol_type = other RNA
gccagggccagcctgagcttcgaggacgtggccgtgggcttcagctgggaggagtggcagctgctggcccccagccagaaggacctgtacagggaggtgatgctggagaactacaggaacctggtgagcgtgggctaccaggccagcaagcccgacagcctgttccacctggagcagggcgagcccccctggaccgtggtgggcgccgcccagagccagacctgccaggagatctgggagatc

SEQ ID NO: 19631 - RNA, 243 nt, synthetic construct
  source 1..243: mol_type = other RNA
agcagccagggcctgctgaccttcagggacgtggccatcgagttcagccaggaggagtggggctgcctgaaccacacccagagggagctgtacagggacgtgatgctggagaactacggccacctgctgttcctgggcctgatcgtgagcaagcccgacctggtgagcttcctggagcagaagaaggacccctgggacgtgaagaggaagaagaccgtggccttccaccccggcaggtgggag

SEQ ID NO: 19632 - RNA, 243 nt, synthetic construct
  source 1..243: mol_type = other RNA
ccccaggagagcgtgaccttcaaggacatcgccgtggacttcacccaggaggagtgggccctgctggacaccagccagaggaagctgtacagggacgtgatgctggagaacatcagccacctggtgagcgtgggctaccacctgtgcaagagcgacgtgatcagccagctggagcagggcgtggagctgtggagggagggcaggggcttcccccagggcctgaaccccgacaggaagagcggc

SEQ ID NO: 19633 - RNA, 243 nt, synthetic construct
  source 1..243: mol_type = other RNA
agccagagccccctgaccttcggcgacgtggccgtggagttcagcggcgaggagtgggcctggctggacagcgcccagaggagcctgcacaggagcgtgatgctggagaactacaggaacctggccagcctgggcctgtgcctgagcaagcccgagatgatcagcagcctggagcagaggaaggagccctgggccgtgaagaggaagagcaccggcggcgagtgcgccgacagccagaccctg

SEQ ID NO: 19634 - RNA, 243 nt, synthetic construct
  source 1..243: mol_type = other RNA
gcccaggagagcgtgatgttcagcgacgtgagcatcgacttcagccaggaggagtgggagtgcctgaacgacgaccagagggacctgtacagggacgtgatgctggagaactacagccacctggtgagcatgggccacagcgtgagcaagcccgacgtgatcagcttcctggagcagggcaaggagccctggctggtggacagggagctgaccagggaccagtggcccgtgctggagagcagg

SEQ ID NO: 19635 - RNA, 243 nt, synthetic construct
  source 1..243: mol_type = other RNA
caggtgcccgtgaccttcgaggacctggccgtgaggttcagcgccgaggagtggcacctgctggaggagtggcagagggagttccacagggacgtgatgagggagaactacgagatgctggtgagcctgggcaccgcccagctgctgcccctgagcgccttcctgagcctgaccgagccccaggaggacatgggcgacaacggctgcagcgacggcgagtgggagaggcccggcggcggcctg

SEQ ID NO: 19636 - RNA, 243 nt, synthetic construct
  source 1..243: mol_type = other RNA
atggagggcctggtgatgttccaggacctgttcatcgacttcagccaggaggagtgggagtgcctggacaccgcccagaaggacctgtacagggacgtgatgatggagaactacagcagcctggtgagcctgggcctgtgcatccccaagcccgacgtgatcagcctgctggagcagggcaaggagccctggatggtgagcagggacgtgctgggcggctggtgccccgacagcgagttcagg

SEQ ID NO: 19637 - RNA, 243 nt, synthetic construct
  source 1..243: mol_type = other RNA
ccccaggagcccgtgaccttcgaggacgtggccgtgtacttcacccagaaccagtgggccagcctggaccccacccagagggccctgtacagggaggtgatgctggagaactacgccagcgtggccagcctggtgttccccttccccaagcccgacctggtgagccagctggagaggggcgaggccccctggggccccgacccctgggaggccgaggtgctgaggggcatctgccccggcggc

SEQ ID NO: 19638 - RNA, 243 nt, synthetic construct
  source 1..243: mol_type = other RNA
gcccaggaggtggtgagcttcaaggacgtggccgtggacttcaccagggaggagtggaggctgctgagccccccccagaaggagctgtacaaggaggtgatgctggagaacgccaggaacctgctgagcgtgggcctgcccgcccccagcgaggaggtgatcagctacctggagcagagggaggccccctggatcctggagcaggagggcctgaggaactgctgcagcgagggcgagatcagg

SEQ ID NO: 19639 - RNA, 243 nt, synthetic construct
  source 1..243: mol_type = other RNA
taccagggcctggtgagcttcgaggacgtggccgtgaacttcacctgggaggagtggcaggacctggacgccgcccagaggaccctgtacagggacgtgatgctggagaactacagcagcctggtgagcctgggccactgcatcaccaagcccgaggtgatcatcaagctggagcagggcgccgccccctggaccgtgaaggagacccccgaccagggcagccccgacgtgcagatcgtggac

SEQ ID NO: 19640 - RNA, 243 nt, synthetic construct
  source 1..243: mol_type = other RNA
agccagggcagcatcaccttcaaggacgtggccgtggacttcacccaggaggagtggtgcctgctggaccacagccagaaggccctgcacctggaggtgatgctggagaacgtgcagaacctgctgagcgtgggcctgcccgtgcccagggagaacttcatcagctgcttccagcagggcaaggccccctacctgctgcagcagaacgaccccaagagcagcagccccgaggccgagaccaac

SEQ ID NO: 19641 - RNA, 243 nt, synthetic construct
  source 1..243: mol_type = other RNA
agcatgggcagcgacctgttcagggacgtggccgtggtgttcagcagggaggagtgggagaggctggcccccgcccagagggacctgtacagggacgtgatgctggagacctacagccacctgaggagcctggacctggccatcagcaagcccgacgtgatcgccttcctggagcagggcgaggagccctggagggccgaggaggccgccagggacggcctgtgccccgtggactgggagtgc

SEQ ID NO: 19642 - RNA, 243 nt, synthetic construct
  source 1..243: mol_type = other RNA
agccagggcagcgtgagcttcaaggacgtgaccgtggacttcacccaggaggagtggcagcagctggaccccgcccagaaggccctgtacagggacgtgatgctggagaactactgccacttcgtgagcgtgggcttccacatgaccaagcccgacatgatcaggaagctggagcagggcgaggagctgtggacccagaggatcttccccagctacagctacctggccgaggacggcaagacc

SEQ ID NO: 19643 - RNA, 243 nt, synthetic construct
  source 1..243: mol_type = other RNA
ttcgaggagagcgtgaccttcgaggacgtggccgtgtacttcagcgagaacgagtggaccggcctggcccccgcccagagggtgctgtacagggacgtgatgctggagaactacggcgccgtggccagcctggccttccccttccccaagcccgccctgatcagccagctggagaggggcgaggccccctggtgcaaggccccccagggcgccctggacggcggcggccccaggggcatcagc

SEQ ID NO: 19644 - RNA, 243 nt, synthetic construct
  source 1..243: mol_type = other RNA
gtgcagggcagcatgagcttcgaggacgtgatcgtggagttcacccaggacgagtggcagtacatgagccccgcccagaggatcctgtacagggacgtgatgctggagaactacagccacctgatcagcgtgggctactgcaccaccaagcccgagatgatcttcaagctggagcagggcgaggagccctggagcctggaggaggagttcctgaaccagaggtaccccggctacttcagcgtg

SEQ ID NO: 19645 - RNA, 243 nt, synthetic construct
  source 1..243: mol_type = other RNA
atggcccaggtgaccttcagcgacgtggccatcgacttcagccacgaggagtgggcctggctggacagcgcccagagggacctgtacaaggacgtgatggtgcagaactacgagaacctggtgagcgtgggcctgagcgtgaccaagccctacgtgatcaccctgctggaggacggcaaggagccctggatggtggagaagaagctgagcaagggcatgatccccgactgggagagcaggtgg

SEQ ID NO: 19646 - RNA, 243 nt, synthetic construct
  source 1..243: mol_type = other RNA
ccccaggccgccatgaccttccaggacgtggccgtggacttcaccagggaggagtggaggctgctggagcccccccagaaggagctgtactgggaggtgatgctggagaactacaggaacctggtgtgcctgggcctgaccgtgagcaagcccgacgtgatcagccagctggagcagggcgaggccccctggaggctggagggcggcagcgccaggggcaggtgcctggactggggcatgagg

SEQ ID NO: 19647 - RNA, 243 nt, synthetic construct
  source 1..243: mol_type = other RNA
ccccaggagctggtgaccttccaggacgtggccgtgtacttcacccccgaggaggtgaggtacctggacagctaccagaaggccctgtacaaggacgtgatgctggagaactacggcaacatggccagcctgggcttccccctgagcaagcccgtgctgatcagccagctggagaggggcgaggagccctgggccatggaccccctggtggccaaggagaggaagaccaggaggggcaccagc

SEQ ID NO: 19648 - RNA, 243 nt, synthetic construct
  source 1..243: mol_type = other RNA
gcccaggaggccgtgaccttcaaggacgtggccgtggacttcaccagggaggagtggaggctgctgagccccccccagaaggagctgtacaaggaggtgatgctggagaacgcccagaacctgctgaccgtgggcctgcccgccccccccgagaacgtgatcagcgccctgggcgccgagggcagccccgtggacgccaggggcaggaggcccgagggcgcctgctgccccggcgagatcatc

SEQ ID NO: 19649 - RNA, 243 nt, synthetic construct
  source 1..243: mol_type = other RNA
ttccaggagcccgtgaccttcaaggacgtggccgtggagttcacctgggaggagtggaggcagctggaccccacccagagggccctgttcagggacgtgatgctggagaactacaggaacctggtgagcctgggcctggccgtgaccaagcccgacgtgatcttccagctggagagcggcgaggtgccctggatgctggagagggaggtgcccaggagcagccccaccgagtgcctgaacctg

SEQ ID NO: 19650 - RNA, 243 nt, synthetic construct
  source 1..243: mol_type = other RNA
ctgcaggccagcgtgaccttcgaggacgtggccgtggacttcagcgccgaggagtggaggaggctgaggcccctgcagagggagctgtacagggaggtgatgctggagaactacaggagcctggcctggctgggcctggccgccagcaagcccggcgtgatctgcaggctggagaggggcgaggcccccagggagcccgaccccgacggcccccagagcggctgggccgactgcggcaccggc

SEQ ID NO: 19651 - RNA, 243 nt, synthetic construct
  source 1..243: mol_type = other RNA
atggccttcgaggacgtggccgtgtacttcagccaggaggagtggggcctgctggacaccgcccagagggccctgtacaggagggtgatgctggagaacttcaccctggtgaccagcctgggcctgagcaccagcaggccccacgtggtgatccagctggagaggggcgaggagccctgggtgcccagcggcaaggacatgaccctggccaggaacacctacaggaggctgaacgccggcgag

SEQ ID NO: 19652 - RNA, 243 nt, synthetic construct
  source 1..243: mol_type = other RNA
gccagggccagcctgagcttcgaggacgtggccgtgggcttcagctgggaggagtggcagctgctggcccccagccagaaggacctgtacagggaggtgatgctggagaactacaggaacctggtgagcgtgggctaccaggccagcaagcccgacagcctgttccagctggagcagggcgagcccccctggaccgtggtgggcgccgcccagagccagacctgccaggaggagatctgggag

SEQ ID NO: 19653 - RNA, 243 nt, synthetic construct
  source 1..243: mol_type = other RNA
ttccagggcctggtgaccttccaggacgtggccgtgatcttcagcctggacgagtggggccacctggaccccgcccagagggagctgtacagggaggtgatgctggagaactaccagaccctggcctgcctgggcctggccgtgagcaagcccgacgtgatcgcccagctggagcagggcggcgccccctggaagctggagaaggacatccccgccagcccctgccccggcgagcagtacgtg

SEQ ID NO: 19654 - RNA, 243 nt, synthetic construct
  source 1..243: mol_type = other RNA
gcccacgtgagcctgagcttcagggacgtggccatcgacctgagccaggaggagtgggagtgcctggaccccgtgcagagggccctgtacagggacgtgatgctggagaactacagcaacctggtgagcctgggctgcagcagccccaagcccgacgtgatcaccctgctggagcaggagaaggagccctggaccgtgatgagggagggcaccaggagctggtacaccgacctggagagcaag

SEQ ID NO: 19655 - RNA, 243 nt, synthetic construct
  source 1..243: mol_type = other RNA
ctgcaggaggccatcgtgttcgaggacgtggccgtgtacttcaccaggatcgagtggagctgcctggccccccaccagagggccctgtacagggacgtgatgctggagaactacggccacatggccagcctgggcttcctggtggccaagcccgccctgatcagcctgctggagcagggcgaggagcccggcgccctgatcctgcagggcaccgaggagcagggcagcaccgccagcctgtgc

SEQ ID NO: 19656 - RNA, 243 nt, synthetic construct
  source 1..243: mol_type = other RNA
agccaggagcccgtgaccttcgaggacgtggccgtgtacttcacccagaaccagtgggccagcctggaccccatgcagagggccctgtacctggaggtgatgctggagaactacgccaacatcaccagcctggccctgcccttccccaagcccgacctgatcctgcagctggagcagggcgaggccccctgggacctggacccctggacccccctggagggcgaggccctggagggcgtgcac

SEQ ID NO: 19657 - RNA, 243 nt, synthetic construct
  source 1..243: mol_type = other RNA
atgccccagggcagcgtgagcttcaaggacgtgaccgtggacttcacccaggaggagtggcagcagctggacagcgcccagaaggccctgtacagggacgtgatgctggagaactactgccacttcgtgagcgtgggcttccacatgaccaagcccgacatgatccacaagctggagcagggcaaggagctgtggaccaccggcaggatcttccccagcaggagctacctgggcgagagcgtg

SEQ ID NO: 19658 - RNA, 243 nt, synthetic construct
  source 1..243: mol_type = other RNA
gtgcaggagcccgtgaccttcaaggacgtggccgtggacttcacccaggaggagtggggccagctggacctggtgcagaggaccctgtacagggacgtgatgctggagacctacggccacctgctgagcgtgggcaaccagatcgccaagcccgaggtgatcagcctgctggagcagggcgaggagccctggagcgtggagcaggcctgcccccagaggacctgcagcgagtgggtgaggaac

SEQ ID NO: 19659 - RNA, 243 nt, synthetic construct
  source 1..243: mol_type = other RNA
gagcccggcgccgtgagcttcgccgacgtggccgtgtacttctgcagggaggagtggggctgcctgaggcccgcccagagggccctgtacagggacgtgatgagggagacctacggccacctgagcgccctgggcatcggcggcaacaagcccgccctgatcagctgggtggaggaggaggccgagctgtgggaccccgccgcccaggaccccgaggtggccaagtgccagaccgaggccgac

SEQ ID NO: 19660 - RNA, 243 nt, synthetic construct
  source 1..243: mol_type = other RNA
gcccacggcagcgtgatgttcaacgacgtgagcatcgtgttcagccaggaggagtgggagtacctggacctggagcagagggacctgtacagggacgtgatgctggagaactacagcaacctggtgagcctgggctgcttcatcagcaagcccgacgtgatcagcctgctggagcagggcaaggagccctggaaggtggtgaggaagggcaggaggaggtaccccgacctggagaccaggtac

SEQ ID NO: 19661 - RNA, 243 nt, synthetic construct
  source 1..243: mol_type = other RNA
caggccgaggtgaccttcgaggacgtggccgtgctgttcagcagggaggagtggggcaggctgggccccgcccagaggggcctgtacagggacgtgatgctggagacctacaggaacctggtgagcctgggcgccggccccgccggccccaagcccggcgtgatcacccagctggagcagggcgacgagccctgggtgctggacgcccagggcgccaagggcaaggagaggctgagggtgagc

SEQ ID NO: 19662 - RNA, 243 nt, synthetic construct
  source 1..243: mol_type = other RNA
aggctggagagcgtgaccttcgaggacgtggccgtgtacttcacccagaaccagtgggccagcctggaccccgcccagagggccctgtacggcgaggtgatgctggagaactacgccaacgtggccagcctggtggccttccccttccccaagcccgccctgatcagccacctggagaggggcgaggccccctggggccccgacccctgggacaccaagatccccaggggcatcagccagggc

SEQ ID NO: 19663 - RNA, 243 nt, synthetic construct
  source 1..243: mol_type = other RNA
caggagcccgtgaccttcgccgacgtggccgtgctgttcacccccgaggagtggatgttcctggacagcgcccagaggagcctgtacagggacgtgatgctggagaactacaggaacctggccagcgtgggcgccggcgaccagctgggcaagcccagcatgctgagcctgagcgagcccggcgaggagctgtgggcccccgagaggaggaccttccccggcaccaggcccgagccccagcac

SEQ ID NO: 19664 - RNA, 243 nt, synthetic construct
  source 1..243: mol_type = other RNA
gagatgggcctgctgaccttcagggacatcgccatcgagttcagcctggccgagtggcagtgcctggaccacgcccagaggaacctgtacagggacgtgatgctggagaactacaggaacctggtgagcctgggcatcgccgtgagcaagcccgacctgatcacctgcctggagcagaacaaggagcccaggaacatcaagaggaacgagatggtggccaagcaccccggcagggagaagagc

SEQ ID NO: 19665 - RNA, 243 nt, synthetic construct
  source 1..243: mol_type = other RNA
ctgcccgacagcctgaccttcaccgacgtggccatcgacttcagccaggacgagtgggagtggctgagcctggcccagaggagcctgtacaggaaggtgatgctggagaactacatgaacctggtgagcgtgggcctgtgcatcagcaagcccgacgtgatcagcctgctggagcaggagaaggagccctggatggtgaccgagcagatcaccaggggcctgtgcgccgacctggagtacatg

SEQ ID NO: 19666 - RNA, 243 nt, synthetic construct
  source 1..243: mol_type = other RNA
gcccagaaggtgctgaccttcagggacgtggccatcgagttcagcctggaggagtggaagttcctggaccccgcccagcagaacctgtacagggacgtgatgctggagaactacaggaacctgttcagcatcggcctgaccgtgagcaagcccggcctgatcacctgcctggagcagaggaaggccccctggaacctgaagaggagggaggccgtggacggccacatcttcttcgccgagtac

SEQ ID NO: 19667 - RNA, 243 nt, synthetic construct
  source 1..243: mol_type = other RNA
ttccagggcagcgtgagcttcaaggacgtgaccgtgggcttcagccaggaggagtggcagcacctggaccccagccagagggccctgtacagggacgtgatgctggagaactacagcaacctggtgagcgtgggctactgcgtgcacaagcccgaggtgatcttcaggctggagcagggcgaggagccctggaggctggaggaggagttccccagccagagcttccccgaggtgtggaccgcc

SEQ ID NO: 19668 - RNA, 243 nt, synthetic construct
  source 1..243: mol_type = other RNA
gcccagggccacgtgaccttcgaggacgtggccgtgtacttcagctgggaggagtggggcctgctggacgaggcccagaggctgctgtacagggacgtgatgctggagaacttcagcctgatggccagcctgggcctggccagcagcatgacccacgagatcacccagctggagtggtggagggagcccttcctgcccccctgcggcgtgatgaccgccgccatgcccagggacggcaggcag

SEQ ID NO: 19669 - RNA, 243 nt, synthetic construct
  source 1..243: mol_type = other RNA
ccccagggcagcgtgaccttcagggacgtggccgtgaacttcagccaggacgagtggggcaggctggaccccagccagaaggagctgtacagggaggtgatgctggagaactaccacaacctggtgtgcctgggcctggccgccagcaagcccgacgtgatcgaccagctggagaggggcgaggccccctggatgcccggcatcggctgccccgaccagaagatcaggagcgacacccaggag

SEQ ID NO: 19670 - RNA, 243 nt, synthetic construct
  source 1..243: mol_type = other RNA
atccaggagagcgtgaccttcaaggacgtgagcgtggacttcacctgggaggagtggaggcacctggaccccgcccagagggacctgtacaggaacgtgatgctggagaactacgagaacctggtgagcgtgggcatcagcgtgagcaccgtggacatgatcagcctgctggagaagagggacggcccctggatgcccgagggcgaggtgagcggcgccatctgccccgacagcctgaacgag

SEQ ID NO: 19671 - RNA, 243 nt, synthetic construct
  source 1..243: mol_type = other RNA
ttccaggagagcctgaccttcaaggacgtggccgtggacttcacctacgaggagtggcagcagctgaaccccgaccagaggtacctgtacagggacgtgatgctggagaactacaagaacctggtgttcctgggccaccagatcagcaagcccgacgtgatcagccagctggagcagggcaaggagccctggcccatcgagagggagatcttcacctacagctgcagggactgggagaccaag

SEQ ID NO: 19672 - RNA, 243 nt, synthetic construct
  source 1..243: mol_type = other RNA
ttccagggcagcgtgaccttcaccgacgtggccatcgacttcagccaggaggagtggaggtggctgcagcccgcccagagggacctgtacaggtgcgtgatgctggagaactacggccacctggtgagcctgggcctgagcatcagcaagcccgacgtggtgagcctgctggagcagggcaaggagccctggctgggcaagaggaacgtgaacagggacctgttcagcgtgagcgagagcagg

SEQ ID NO: 19673 - RNA, 243 nt, synthetic construct
  source 1..243: mol_type = other RNA
agccagagcctggtgaccttcggcgacgtggccgtggagttcagccccgaggagtgggagtggctggacagcgcccagaggagcctgtacaggagcgtgatgctggagaactacaggagcctggtgagcctgggcctgtgcgtgagcaagcccaagatgatcagcagcctggagcagaggaaggagccctgggccgccaagaggaccctgaccaggggcggctgcagcgacagcagggccctg

SEQ ID NO: 19674 - RNA, 243 nt, synthetic construct
  source 1..243: mol_type = other RNA
gcccaggtgctggtgaccttccaggacgtggccgtggacttcacccaggaggagtggaggctgctggaccccggccagaaggagctgtacaaggaggtgatgctggacaacgcccagaacatgctgttcctgggcctgcccgtgcccagggaggactggttcagccacttccacgagggcggcgccagctggatgctggagggcgaggaccccagcaacagcggcctggacggcgagaggagg

SEQ ID NO: 19675 - RNA, 243 nt, synthetic construct
  source 1..243: mol_type = other RNA
ccccagggcctggtgaccttcagggacgtggccgtggacttcaccagggaggagtggaggctgctgagccccaggcagaaggagctgtacaaggaggtgatgctggagaacgccggcaacctgctgagcctgggcctgcccgtgcccagggaggacgtgatcagctacttcgagcagaaggacgtgccctggatgctggagcagaaggccctgaggagcttctgccccggcggccccgtgaag

SEQ ID NO: 19676 - RNA, 243 nt, synthetic construct
  source 1..243: mol_type = other RNA
gcccccctgcccctgaccttcgaggacgtggccgtgtacttcagcgagcaggagtggaggaacctggaggcctggcagaaggagctgtacaagcaggtgatgaggaccaactacgagatcctggtgagcctggacgacggcctgcccaagcccgagctgatcagctggctggagcagggcagggagctgttcaagaactggggcgagagccagaagagcggcaacatcatctgcttcagcgcc

SEQ ID NO: 19677 - RNA, 243 nt, synthetic construct
  source 1..243: mol_type = other RNA
agccagggcctggtgaccttcggcgacgtggccatcgacttcagccaggaggagtgggagtggctgagccccatccagaggaacctgtacaggaaggtgatgctggagaactacaggaacctggccagcctgggcctgtgcgtgagcaagcccgacgtgatcagcctgctggagcagggcaaggagccctggaccgtgaagaggaagatgaccagggccggctgccccgacctgaaggccgtg

SEQ ID NO: 19678 - RNA, 243 nt, synthetic construct
  source 1..243: mol_type = other RNA
gcccaccacctggtgatgttcagggacgtggccgtggacttcagccaggaggagtgggagtgcctgaacagctaccagaggaacctgtacagggacgtgatcctggagaactacagcaacctggtgagcgtgggctgcagcatcagcaagcccgacgtgatcaccctgctggagcagggcaaggagccctggatggtggtgagggacgagaggaggaggaggagcctggacctggagagcagg

SEQ ID NO: 19679 - RNA, 243 nt, synthetic construct
  source 1..243: mol_type = other RNA
gcccaggagagcctgaccctggaggacgtggccgtggacttcagcagggaggagtggaggctgctggcccccgcccagaaggacctgtacagggacgtgatgctggagaactacaggaacctggtgagcgtgggccaccaggccagcaagcccgacgtgctggccaggctggagaggggcgaggagccctgggccatcgaggaggaggtgaggagcggcaccagccccgagaccggcaaggtg

SEQ ID NO: 19680 - RNA, 243 nt, synthetic construct
  source 1..243: mol_type = other RNA
ccccaggagcccgtgaccttcgaggacgtggccgtgtacttcacccagaaccagtgggccagcctggaccccacccagagggccctgtacagggaggtgatgctggagaactacgccagcgtggccagcctggtgttccccttccccaagcccgacctggtgagccagctggagagggaggaggccccctggggccccgacccctgggaggccgaggtgctgaggggcatctgccccggcggc

SEQ ID NO: 19681 - RNA, 243 nt, synthetic construct
  source 1..243: mol_type = other RNA
agcctggagagcgacgtgttcaccgacgtggccatcgtgttcagccaggaggagtgggagcagctggcccccgcccagagggacctgtacagggacgtgatgctggagacctacagcaacctggtgagcctgggcctggccatcgccaagcccgacgtgatcagcttcctggaggagggcaaggagccctgggtggtggagaagaccagcaggggcggcctgtgccccgtgctggagagcagg

SEQ ID NO: 19682 - RNA, 243 nt, synthetic construct
  source 1..243: mol_type = other RNA
gcccaggaggtggtgaccttccaggacgtggccgtggacttcaccagggaggagtggaggctgctgagccccccccagaaggagctgtacaaggaggtgatgctggagaacgccaggaacctgctgagcgtgggcctgcccgccccccccgacgacgtggtgagctacctggagcagagggagggccccagcatgctggaccaggaggacctgaggacctgcggccccgagggcgagatcagg

SEQ ID NO: 19683 - RNA, 243 nt, synthetic construct
  source 1..243: mol_type = other RNA
atccagggcagcctgaccttcaaggacgtggccgtggacttcacccaggaggagtggtgcctgctggaccacagccagaaggagctgtacctggaggtgatgctggagaacgtgcagaacctgctgagcgtgggcctgcccgtgcccagggagtactgcaccagctacttccagcaggagaaggccaggtggctgctggagcagaagtgccccaggagcagcagccccgaggccgagaccaac

SEQ ID NO: 19684 - RNA, 243 nt, synthetic construct
  source 1..243: mol_type = other RNA
ccccaggagagcgtgaccttcgaggacgtggccgtgtacttcacccagaaggagtgggagggcctggcccccgcccagagggccctgtacagggacgtgatgctggagaactacggcaacctggtgagcctggccttcctgttccccaagcccgccgtgatcagccagctggagcagggcgagaagccctggatccagaccccccagaggcccctggacaagaagaagacctacaagggctgc

SEQ ID NO: 19685 - RNA, 243 nt, synthetic construct
  source 1..243: mol_type = other RNA
agccagggcagcatcaccttcaaggacgtggccgtggacttcacccaggaggagtggtgcctgctggaccccagccagaaggagctgtacagggaggtgatgctggagaacgtgcagaacctgctgttcgtggagaccaacttcgaggtgaaggagatcagcaccaagcagagcctgttcgtggagggcagcggcccccccaggggcaagaacaagggcccctgcgacttcctgctgagggag

SEQ ID NO: 19686 - RNA, 243 nt, synthetic construct
  source 1..243: mol_type = other RNA
aacctggaggccgtgaccttccaggacgtggccgtggagttcacctgcgaggagtggaggcacctggcccccccccagaaggagctgtacagggacgtgatgctggagaactacaagaacctggtgaggctgggcctggccgtgagcaagcccgacgtgatcagccagctggagaggagggaggccccctggatgcccggcggcatccagaggagcaggtgccccgactgggaggccagctgc

SEQ ID NO: 19687 - RNA, 243 nt, synthetic construct
  source 1..243: mol_type = other RNA
agccagggcagcatcaccttcaaggacgtggccgtggacttcacccaggaggagtggtgcctgctggaccacagccagaaggagctgtacctggaggtgatgctggagaacgtgcagaacctgctgagcgtgggcctgcccgtgcccagggagaacttcatcagctgcctgcagcagggcaaggccccctggctgctggcccagaaggacagcaggaacagctgcctggaggccaagaccaac

SEQ ID NO: 19688 - RNA, 243 nt, synthetic construct
  source 1..243: mol_type = other RNA
atccagggcagcctgaccttcaaggacgtggccgtggacttcacccaggacgagtggtgcctgctggacaacagccagaaggagctgtacctggaggtgatgctggagaacgtgcagaacctgctgagcgtgggcctgcccgtgcccagggagtacctgaccagctgcttccagcagggcgaggccccctggctgctggagcaggaggtgcccaggagcagctgccccgaggccgagaccaac

SEQ ID NO: 19689 - RNA, 243 nt, synthetic construct
  source 1..243: mol_type = other RNA
agccagggcctggtgaccttcagggacgtggccctggacttcagccaggaggagtgggagtggctggaccccagccagaaggacctgtacagggacgtgatgctggagaactacaggaacctggtgtggctgggcctgagcatcagcaagcccaacatgatcagcctgctggagcagggcaaggagccctggatggtggagaaggagatgagcgacggccagtgcgccgactgggagagctgg

SEQ ID NO: 19690 - RNA, 243 nt, synthetic construct
  source 1..243: mol_type = other RNA
ttccaggagaccgtgaccttcaaggacgtggccgtggtgttcagcgaggaggagctgggcctgctggacagcacccagaggaagctgtacagggacgtgatgctggagaacttcaggaacctggtgagcgtgggccacagcagcagcaagcccgacatgatcagccagctggagagggaggagaagctgtgcatgaaggagatccacaccgagaggggcaggcacagcggcggcaggaaccag

SEQ ID NO: 19691 - RNA, 243 nt, synthetic construct
  source 1..243: mol_type = other RNA
gaggaggtgcccgtggtgttcgaggacgtggccgtgtacttcaccagggaggagtgggccgccctggacaagaggcagaaggagctgtacagggacgtgatgaggaccaactacgagctgctggccagcctgggccccgccgccgccaagcccgacctgatcagcaagctggagaggagggccgccccctggatcagggaccccgacggccccgagtggggcaagggcaggccccccggcaag

SEQ ID NO: 19692 - RNA, 243 nt, synthetic construct
  source 1..243: mol_type = other RNA
ttccaggagctggtgagcttcaaggacgtgaccgtgggcttcacccaggaggagtggcagcacctggaccccacccagaggagcctgtacagggacgtgatgctggagaactacagcaacctggtgagcgtgggctactgcgtgaccaagcccgaggtgatcttcaggctggagcagggcgaggagccctggatcctggaggaggagttccccaggcagagcttccccgaggtgtggaagatc

SEQ ID NO: 19693 - RNA, 243 nt, synthetic construct
  source 1..243: mol_type = other RNA
atggccttcagggacgtggccgtggacttcacccaggaggagtggatgctgctgagccccgcccagaggagcctgtacagggaggtgatgctggagaactacagcaacctggtgagcctgggcatccccttcagcaagcccaagctgatcacccagctggagcagggcaaggagacctggagggaggagaggaagtgcccccccgccaacggcccccccgagcccaagcccgagctgcacctg

SEQ ID NO: 19694 - RNA, 243 nt, synthetic construct
  source 1..243: mol_type = other RNA
gagcccggcaccgtgagcttcggcgacgtggccgtgtacttcagcagggaggagtggggctgcctgaggcccgcccagagggccctgtacagggacgtgatgagggagacctacagccacctgggcgccctgggcgtgggcggcagcaagcccgccctgatcagctgggtggaggaggaggccgagctgtggggccccgccgcccaggaccccgaggtggccaagaggcccaccgaggccgac

SEQ ID NO: 19695 - RNA, 243 nt, synthetic construct
  source 1..243: mol_type = other RNA
gcccaggcccccctgagcttcgaggacgtggccgtgagcttcagcagggaggagtggaggctgctggtgcccgcccagaaggacctgtacagggacgtgatgctggagaactacaggaacctggtgagcgtgggctaccaggccagcgagcccggcagcctgttccagctggagcacgccggccccctgagggccgtggagggcgccgcccccaggcccccctgccccgaggagatctgggag

SEQ ID NO: 19696 - RNA, 243 nt, synthetic construct
  source 1..243: mol_type = other RNA
atgctgttccaggagctggtgaccttcaaggacgtggccgtggacttcacccaggaggagtggaagtgcctggcccccagccagaaggagctgtacagggaggtgatgctggagaactacaggaacctggtgagcctgggcagggccgtgagcaagcccgagctgatccaccagctggagaggggcgagaccccctggaggcccaagggcgacggctggaggaacagcctgaggcccggcgag

SEQ ID NO: 19697 - RNA, 243 nt, synthetic construct
  source 1..243: mol_type = other RNA
ggccaggaggaggtggccttcaaggacgtggccgtggacttcaccagggaggagtggaggctgctgagccccccccagaaggagctgtacaaggaggtgatgctggagaacatcaggaacctgctgagcgtgggcctgcccgccccccccgaggacatgatcagctacctggagcagagggaggccccctggatgctggagcaggagggcctgaggagctacagccccggcgaggagatcagg

SEQ ID NO: 19698 - RNA, 243 nt, synthetic construct
  source 1..243: mol_type = other RNA
ggccaggaggaggtgaccttcaaggacgtggccgtggacttcaccagggaggagtggaggctgctgagccccccccagaaggagctgtacaaggaggtgatggtggagaacgccaggaacctgctgagcgtgggcctgcccgcccccaccaaggacgtgctgagctacctgaagaagaggggcgcccccgtgatgctggagcaggagggcctgaggaactacttccccgagggcgagatcagg

SEQ ID NO: 19699 - RNA, 243 nt, synthetic construct
  source 1..243: mol_type = other RNA
ttccaggagagcgtgaccttcaaggacgtgaccgtgaacttcacccaggaggagtgggagcagctgaaccccgcccagagggagctgtacagggacgtgatgctggagaactacaggaacctgatcagcctgggcctgcccatcagcaagcccgacgtgatcttccagctggagcagggccaggagccctggatgctggacgtgcagggcaccgagaggcaggccgtgcccaggagcaccagc

SEQ ID NO: 19700 - RNA, 243 nt, synthetic construct
  source 1..243: mol_type = other RNA
gtggccttcgaggacgtggccgtgaacttcacccaggaggagtgggccctgctggaccccagccagaagaacctgtacagggaggtgatgcaggagaccctgaggaacctggccagcatcggccagaggtggagcaaccagaacgccgaggacaagcaccagaaccccaggaggaacctgaggaggctgatcggcgagaggctgttccagagcaaggagagccaccagcacgtggaggtgctg

SEQ ID NO: 19701 - RNA, 243 nt, synthetic construct
  source 1..243: mol_type = other RNA
atggtgttcgaggacgtggccgtgtacttcagcagggaggagtggggcctgctggacagcgcccagagggccctgtacaggcaggtgatgctggagaacttcgccctggtggccagcctgggcctgagcgccagcaggcccaggatcgtgctgcagctggagaggggcgaggagccctgggtgctgagcggcctggacgtggccctggccagggacgcccagaggaggcccggccccggcgag

SEQ ID NO: 19702 - RNA, 243 nt, synthetic construct
  source 1..243: mol_type = other RNA
gaggagctgcccgtggtgttcgaggacgtggccgtgtacttcaccagggaggagtggggcatgctggacaagaggcagaaggagctgtacagggacgtgatgaggatgaactacgagctgctggccagcctgggccccgccgccgccaagcccgacctgatcagcaagctggagaggagggccgccccctggatcaaggaccccaacggccccaagtggggcaagggcaggccccccggcaac

SEQ ID NO: 19703 - RNA, 243 nt, synthetic construct
  source 1..243: mol_type = other RNA
tggaaggagagcctgagcttcgaggacgtggccctgtacttcaccagggaggagtggagcaggctggactgggcccagaaggacctgtacagggacgtgatgctggagaactacaggaacatgatcgtgctgggcttccagttccccaagcccgaggtgatctgccagctggagcagtgggaggagccctggatcctggacctgcccagggccggcaccaggaaggccagcggcagcgcctgc

SEQ ID NO: 19704 - RNA, 243 nt, synthetic construct
  source 1..243: mol_type = other RNA
agccaggagagcgtggccttcgaggacgtggccgtgtacttcaccaccaaggagtgggccatcatggtgcccgccgagagggccctgtacagggacgtgatgctggagaactacgaggccgtggccttcgtggtgccccccaccagcaagcccgccctgatcagccacctggagcagggcaaggagagctgcttcatcaggccccagggcgtgctgagcaggagcgactggagggccggcctg

SEQ ID NO: 19705 - RNA, 243 nt, synthetic construct
  source 1..243: mol_type = other RNA
cagcccagggaggccgtgaccttcaaggacgtggaggtgaccttcagccaggacgagtggggctggctggaccccgcccagaggaacctgtacagggacgtgatgctggagaactacggcaacgtggtgagcctggtgggccccttcaccaagcccgtgctgatcagctggctggaggccagggagccctggggcctgaacgtgcagggcgcccagcccaagggcaagcccggcgtggccccc

SEQ ID NO: 19706 - RNA, 243 nt, synthetic construct
  source 1..243: mol_type = other RNA
gcccaggtgctggtgaccttccaggacgtggccgtggacttcacccaggaggagtggaggctgctggaccccggccagaaggagctgtacaaggaggtgatgctggagaacgccgagaacatgctgttcctgggcctgcccgtgcccagggaggactggttcttccacttccacgagggcggcgacccctggatgctggagggcaagggccccagcatcagcaggctggacgaggagaggcac

SEQ ID NO: 19707 - RNA, 243 nt, synthetic construct
  source 1..243: mol_type = other RNA
gcccagggcctggtgctgttcgaggacgtgagcgtggacttcacccagaaggagtggcagctgctggacaggacccagaggctgctgtacagggacgtgatgctggagaactacggccacctggtgagcctgggccactgcgtgagcaagcccgagctgatcctgaagctggagcaggaggaggagccctggatcctgaagggccagctggccagcgagagccaccccgaggtgcagaggacc

SEQ ID NO: 19708 - RNA, 243 nt, synthetic construct
  source 1..243: mol_type = other RNA
gtgaaggaggtggtgaccctgcaggacgtggccgtggacttcacctgggaggagtggaggctgctgagccccccccagaaggagctgtacagggaggtgatgctggagaacgcccagaacctgctgagcgtgggcctgcccgcccccctggaggacgtgctgagctacctggagcagaggaagggcccctggatgctggagcagaagaggctgaggagctgctgccccggcgagatcaggctg

SEQ ID NO: 19709 - RNA, 243 nt, synthetic construct
  source 1..243: mol_type = other RNA
ctgcaggtgagcgtgagcttcgaggacgtgaccgtggacttcagcagggaggagtggcagcacctggaccccgcccagaggaggctgtacagggacgtgaccctggagaactacagccacctgcacagcgtgggctaccaggtgcccaagcccgaggtgatcttcaagctggagcagggcgagggcccctggaccctggagggcgagaccccccaccagggctgcagcgacgaggccatcggc

SEQ ID NO: 19710 - RNA, 243 nt, synthetic construct
  source 1..243: mol_type = other RNA
ttccaggccagcgtgaccttcaaggacgtggccgtggacttcacctgggaggagtggaggctgctggaccccccccagaaggagctgttctgggaggtgatgctggagaactacaggaacctggtgtgcctgggcctggccgacagcaacaaggacgtgatgatcagcgagctggagagcggcgagccccactggatccccaccggcggcgtgctgaggagctgctggcccggctgggagagc

SEQ ID NO: 19711 - RNA, 243 nt, synthetic construct
  source 1..243: mol_type = other RNA
ggccaggagagcgtgagcttcaaggacgtgaccgtggacttcacctgggacgagtggctgcagctgaccggcatgcagaggaccctgtacagggacgtgatgctggagaactacagccacctggtgagcgtgggctgctgcatcaccaagcccgaggtgatcttcaagctggagcagggcgaggagccctggcccagggagggcgagctgcccggcaggagggaccccgacaggagccaggag

SEQ ID NO: 19712 - RNA, 243 nt, synthetic construct
  source 1..243: mol_type = other RNA
ttccaggagagcgtgaccttcgaggacgtggccgtgtacttcagcgagaacgagtggatcggcctggcccccgcccagagggtgctgtacagggacgtgatgctggagaactacggcgtggtggccagcctggccttccccttccccaagcccgccctgatcagccagctggagaggggcgaggccccctggtgcaaggccccccagggcgccgtggacggcgagtgccccaggggcgtgagc

SEQ ID NO: 19713 - RNA, 243 nt, synthetic construct
  source 1..243: mol_type = other RNA
ttccaggaggccgtgaccttcaaggacgtggccgtggtgttcagcgaggaggagctgggcctgctggaccccacccagaggaagctgtacagggacgtgatgctggagaacttcaggaacctggtgagcctgggccacagcagcagcaagcccgacgtgatcagccagctggagagggaggagaagctgtgcaccaaggagttccacacccagggcggcggcaggaaccagaaggagatggag

SEQ ID NO: 19714 - RNA, 243 nt, synthetic construct
  source 1..243: mol_type = other RNA
ttccaggagcccgtgaccttcgaggacgtggccgtgtacttcacccagaacgagtgggccagcctgcaccccatgcagagggccctgcacagggaggtgatgctggagaactacgccaacgtgaccagcctgagcgccttccccttccccaagcccgacctgatcttccagctggagcagggcgaggccgcctggggccccgacccctggaccctggccggcggcgagaccctgaggggcatg

SEQ ID NO: 19715 - RNA, 243 nt, synthetic construct
  source 1..243: mol_type = other RNA
cccaacgccctggtgaccttccaggacgtgttcgtggacttcagccccgaggagctggccagcctgagcgccgcccagaggaggctgcacagggaggtgaccctggagaactacaggaacctggtgagcctgggctaccagttccccaggcccgacatcatcacccagctggaggaggaggagagcagcgccatggaggaggacagcaacaccaagaccggccccgactgggagaccggcccc

SEQ ID NO: 19716 - RNA, 243 nt, synthetic construct
  source 1..243: mol_type = other RNA
cccggccaggaggtggtgaccttcaaggacatggccgtggacttcaccagggaggagtggaggctgctgacccccccccagaaggagctgtacaaggaggtgatgctggagaacgccaggaacctgctgagcgtgggcttcgccgtgcccggcgacgtgatcagctacctggagcagagggaggccccctggctgctggagcaggagggcctgaggagctgcagccccggcgacatcagcccc

SEQ ID NO: 19717 - RNA, 243 nt, synthetic construct
  source 1..243: mol_type = other RNA
gcccccgcccccgtgagcttcagggacgtggccgtggacttcaccaggcaggagtggcagctgctggcccccgcccagagggccctgtacagggaggtgatgctggagaactacaggaacgtggccagcctgggccaccccgtgagcaagcccaacgtgatcttccagctggagcagagcgaggccccctggatgcccgagggcgaggccgccaggagcctgccccccgactgggaggccagg

SEQ ID NO: 19718 - RNA, 243 nt, synthetic construct
  source 1..243: mol_type = other RNA
agcatcaccttcaaggacgtggtggtggacttcacccaggaggagtggtgcctgctggaccccagccagaaggagctgtacagggaggtgatgctggagaacgtgcagaacctgttcttcgtggaggccgagaccaacttcgaggtgaaggagatgagcaccaagatgaggctgttcgtggagggcagcaacagccccaggggcatgaagaggaacccctgcgacttcctgttcagggagatc

SEQ ID NO: 19719 - RNA, 243 nt, synthetic construct
  source 1..243: mol_type = other RNA
gccctgaggagcgtgatgttcagcgacgtgagcatcgacttcagccccgaggagtgggagtacctggacctggagcagaaggacctgtacagggacgtgatgctggagaactacagcaacctggtgagcctggccggctgcttcatcagcaagcccgacgtgatcagcagcctggagcagggcaaggagccctggaaggtggtgaggaagggcaggaggcagtaccccgacctggagaccaag

SEQ ID NO: 19720 - RNA, 243 nt, synthetic construct
  source 1..243: mol_type = other RNA
ctgctgaccttcgaggacgtggccgtgagcttcagcgaggaggagtggaagctgctggaccccacccagaagatcctgtacaacgacgtgatgcaggagaactacgagaccgtgatcagcctgggcctgaagctgaagaacgacaccggcaacgaccagcccatcagcctgagcgccctggagatccaggccagcggctgcaaggtgctgaggaaggccaggatgaaggtggcccagaagacc

SEQ ID NO: 19721 - RNA, 243 nt, synthetic construct
  source 1..243: mol_type = other RNA
ggcgccagggtgctggtgagcttcgccgacgtggccgtgtacttcagccccgaggagtggggcaggctgaggcccgagcagagggccctgtacagggacgtgatgagggagacctacggccacctgggcgccctgggcttccccggccccaagcccgccctgatcagctggatggaggaggccgcctgggacagcgaggccaagcccgtgatcaagaggctggaggacgtgggccagcccccc

SEQ ID NO: 19722 - RNA, 243 nt, synthetic construct
  source 1..243: mol_type = other RNA
aggcaggagagggtgaccttcggcgacgtggccgtggacttcaccctggacgagtgggtgtgcctggacagcgcccagaaggccctgtacagggacgtgatgctggagaactacggccacctggtgtgcctgggcctggccggcgccaagcccgccgtgatccagaggctggagaggggcgaggccgcctggtgccccggcgtgcccggcagcaggctgcccgactgggagaccaggctggag

SEQ ID NO: 19723 - RNA, 243 nt, synthetic construct
  source 1..243: mol_type = other RNA
cccctggagaccgtgaccttcggcgacgtggtgctggacttcacccaggaggagtgggccctgctggacaccagccagaagaagctgttcagggacgtgatgctggagaacatccaccacctggtgagcgtgggctaccagatcagcaagagcgacgtgatcctgcagctggagcagggcaaggagctgtggagggagggcgagggcaggccccagggcaggggccccggcagcgagagcccc

SEQ ID NO: 19724 - RNA, 243 nt, synthetic construct
  source 1..243: mol_type = other RNA
ttccaggagagcgtgaccttcgaggacgtggccatctacttcagcgagaacgagtggaccggcctggcccccgcccagagggccctgtacagggacgtgatgctggagaactacggcgccgtggccagcctggccgccttccccttccccaagcccgccctgatcttccagctggagcagggcgaggccccctggagcagcgccccccagggcgccctggacggcgagggccccaggggcatc

SEQ ID NO: 19725 - RNA, 243 nt, synthetic construct
  source 1..243: mol_type = other RNA
agcaaggcccccgtgaccttcggcgacctggccatctacttcagccaggaggagtgggagtggctgagccccatccagaaggacctgtacgaggacgtgatgctggagaactacaggaacctggtgagcctgggcctgagcttcaggaggcccaacgtgatcaccctgctggagaagggcaaggccccctggatggtggagcccgtgaggaggaggagggcccccggctggaccaccatgatg

SEQ ID NO: 19726 - RNA, 243 nt, synthetic construct
  source 1..243: mol_type = other RNA
gccagcggcaccctgaccttcgacgacgtggccctgtacttcagcgagcaggagtgggagatcctggagaagtggcagaagcagatgtacaagcaggagatgaagaccaactacgagaccctggacagcctgggctacgccttcagcaagcccgacctgatcacctggatggagaagggcaggatgctgctgatcagcgaccagggcaggctgcacaagaccaagaggaccgccggccccccc

SEQ ID NO: 19727 - RNA, 243 nt, synthetic construct
  source 1..243: mol_type = other RNA
caccaggaggtggtgaccttcgaggacgtggccgtgtacttcacccagaccgagtgggccggcctgagccccgcccagagggccctgtacaggagcgtgatgctggagatctacggcaacctgaccagcctgggctaccccgtgcccaagcccgccctggtgagcctgctggagaggggcgacctgcccgtgggcctggagacccaggacaacccccccgcccagggcaccagggacatctac

SEQ ID NO: 19728 - RNA, 243 nt, synthetic construct
  source 1..243: mol_type = other RNA
caccagggcctgctgaccttcagggacgtggccgtggagttcagcctggaggagtggggcaggctgacccacacccagaggcagctgtacagggacgtgatgctggagaactacggccacctgctgttcctgggcctgatcgtgagcaagcccgacctggtgagcttcctggagcagaagaaggagccctggaacctgaagaggaagaagaccgtggccttccaccccgccatcagcagccac

SEQ ID NO: 19729 - RNA, 243 nt, synthetic construct
  source 1..243: mol_type = other RNA
aggcccggcgccgtgagcttcgccgacgtggccgtgtacttcagccccgaggagtggggctgcctgaggcccgcccagagggccctgtacagggacgtgatgagggagacctacggccacctgggcgccctgggcttcgccggcagcaagcccgccctgatcagctggctggagaggaagaaggaggtgtggagccccgaggccgaggaccccgaggacggcgccaggcaccccggcagcggc

SEQ ID NO: 19730 - RNA, 243 nt, synthetic construct
  source 1..243: mol_type = other RNA
agcaaggcccccgtgaccttcggcgacctggccatctacttcagccaggaggagtgggagtggctgagccccatccagaaggacctgtacgaggacgtgatgctggagaactacaggaacctggtgagcctgggcctgagcttcaggaggcccaacgtgatcaccctgctggagaagggcaaggccccctggatggtggagcccgtgaggaggaggagggcccccgagctgaccgaggccagc

SEQ ID NO: 19731 - RNA, 243 nt, synthetic construct
  source 1..243: mol_type = other RNA
tgctaccaggacagcgtgaccttcgacgacgtggccgtggacttcacccaggaggagtggaccctgctggacagcacccagaggagcctgtacagcgacgtgatgctggagaactacaagaacctggccaccgtgggcggccagatcatcaagcccagcctgatcagctggctggagcaggaggagagcaagaccgtgcagggcggcgtgctgcagggcaggaagacccagtggaggggcacc

SEQ ID NO: 19732 - RNA, 243 nt, synthetic construct
  source 1..243: mol_type = other RNA
agccagagcctggtgaccttcggcgacgtggccgtggacttcagcagggaggagtgggagtggctgagcagcgcccagaggaccctgtacaggaccgtgatgctggagaactacaggaacctggtgagcctgggcctgtgcatcagcaagcccgacatgatcagcagcctggagcagaggaaggagccctggatggccaagaggaagctgaccaggggcaggtgccccgacctgaagatcgtg

SEQ ID NO: 19733 - RNA, 243 nt, synthetic construct
  source 1..243: mol_type = other RNA
gcctgcggcagcatcaccttcagggacgtggccatcgacttcagccaccaggagtgggagtacctgaacctggtgcagaagaccctgtaccaggaggtgatgatggagaactacgacaacctggtgctgctgggccacagcaagagcaagcccgacctgatcaccctgctggagcagggcaaggagccctggatgatcgtgagggaggagaccaggggcgagtgcaccgccgagctgcagagc

SEQ ID NO: 19734 - RNA, 243 nt, synthetic construct
  source 1..243: mol_type = other RNA
caccaggaggtggtgaccttcgaggacgtggccgtgtacttcaccaggaccgagtgggccggcctgagccccgcccagagggccctgtacaggagcgtgatgctggagatctacggcagcctgaccagcctgggctaccccgtgcccaagcccgccctgatcagcctgctggagaggggcgacctgcccgtgggcctggagacccaggacaacccccccgcccagggcaccagggacatctac

SEQ ID NO: 19735 - RNA, 243 nt, synthetic construct
  source 1..243: mol_type = other RNA
ttccagggcagcgtgagcttcaaggacgtgaccgtgggcttcaccctggaggagtggcagcacctggacagcacccagaggagcctgtacagggacgtgatgctggagaactacagcaacctggtgagcctgggctactgcgtgaccaagcccgaggtgatcttcaggctggagcagggcgaggagccctggatcctggaggaggagttccccagccagagcttccccgagagctgggagacc

SEQ ID NO: 19736 - RNA, 243 nt, synthetic construct
  source 1..243: mol_type = other RNA
agcgtgatgttcaacgacatcagcatcgtgttcagccaggaggagtgggagtacctggacctggagcagaaggacctgtacaaggacgtgatgctggagaactacggcaacctggtgagcctgggctgcttcatcgccaagcccgacgtgatcagcctgctggagcagggcaaggagccctggaaggtgatcaggaagggcaggaggggctaccccgacctggagaccaggtacgagaccaag

SEQ ID NO: 19737 - RNA, 243 nt, synthetic construct
  source 1..243: mol_type = other RNA
ggcaccgtggtgttcagcgacgtgagcgtggacttcagccaggaggagtgggagtgcctggaccccgtgcagagggacctgtacagggaggtgatgctggagaactacagcaacctggtgagcgtgggcgccggcccctacatccccaagccccaggtgatcagcctgctggagcagggcaaggagccctggatggtgggcagggagctgaccaggggcctgtgcagcgacctggagagcatg

SEQ ID NO: 19738 - RNA, 243 nt, synthetic construct
  source 1..243: mol_type = other RNA
ccccaggacctgatgaccttcgaggacgtggccgtggagttcacccagtgggagtggggccagctggaccccgcccagaaggacctgtacagggtggtgatgctggagaacttcaagaacctggccagcctgggcttccccgtggccaagccctacgtgatcagccagctggagaagggcaaggagccctgcgtgctggagggcgagatcagcaccgactgggagaagaggcccaaggccaag

SEQ ID NO: 19739 - RNA, 243 nt, synthetic construct
  source 1..243: mol_type = other RNA
acccccgagcccgtgaggttcgccgacgtggccgtgtacttcagcctggaggagtggggctgcctgcagcccgcccagagggccctgtacagggacgtgatgagggagacctacggccacctgggcgccctgggcttcaggggcaccaagcccgccctgatcagctgggtggagaaggaggccgagctgtggggccccgacgccagggaccccgaggtgggcgagtgcctgaccgaggccgac

SEQ ID NO: 19740 - RNA, 243 nt, synthetic construct
  source 1..243: mol_type = other RNA
ccccagggcctggtgaccttcggcgacgtggccgtggacttcagccaggaggagtgggagtggctggactgcgcccagaggaccctgtacaggagcgtgatgctggagaactacaggagcctggtgagcctgggcctgtgcgtgagcaagcccgagatgatcagcagcctggagcagaggaaggagccctggaccgtgaagaggaagtgcaccaggggccagtgccccgacagcgaggccgtg

SEQ ID NO: 19741 - RNA, 243 nt, synthetic construct
  source 1..243: mol_type = other RNA
gagcccgtgaccttcaaggacgtggccgtggtgttcagcgaggaggagctgggcctgctggacagcgtgcagaggaagctgtacagggacgtgaccctggagaacttcaggaacctggtgagcgtgggccacctgttcagcaagcccgacgtgatcagccagctggagagggaggagcagctgtggatgaccgagatccagacccagaggggcggccacagcgccgagaactgcgccgccagg

SEQ ID NO: 19742 - RNA, 243 nt, synthetic construct
  source 1..243: mol_type = other RNA
tacgaggagatggtgaccttcgaggacgtggccgtgcacttcaccaagaccgagtggaccggcctgagccccgcccagagggccctgtacaggagcgtgatgctggagaacttcggcaacctgaccgccctgggctaccccgtgcccaagcccgccctgatcagcctgctggagggcggcgacatggcctggggcctggaggcccaggacgaccccctggccgagatgaccaagaacgtgtgc

SEQ ID NO: 19743 - RNA, 243 nt, synthetic construct
  source 1..243: mol_type = other RNA
gcccaggagatggtgaccttccaggacgtggccgtggacttcaccagggaggagtggtgcctgctgagccccccccagaaggagctgtacaaggaggtgatgctggagaacgccaggaacctgctgagcgtgggcctgcccgccctgcccgaggacgtgatcagctacctggagcagagggaggccccctggatgctggagagggagggccccaggagctgctgccccggcgagatcctgctg

SEQ ID NO: 19744 - RNA, 243 nt, synthetic construct
  source 1..243: mol_type = other RNA
gaggagctgcccgtggtgttcgaggacgtggccgtgtacttcaccagggaggagtgggccatgctggacaagaggcagaaggagctgtacagggacgtgatgaggatgaactacgagctgctggccagcctgggccccgccgcccccaagcccgacctgatcctgaagctggagaggagggccgccccctggatcaaggaccccaacggccccaagtggggcaagggcaggccccccggcaag

SEQ ID NO: 19745 - RNA, 243 nt, synthetic construct
  source 1..243: mol_type = other RNA
atgaccttcgaggacgtggccgtggagttcaccaggtgggagtggggccagctggaccccacccagaaggacgtgtacagggaggtgatgctggagaacttcaagaacctggccagcctgggcttccccatgagcaagccctacgtgatctgcaggctggaggagggcgaggagccctgcatcctggagagggagatcagcaccggcgcccccgccgactgggagaggaggaggcaggccaag

SEQ ID NO: 19746 - RNA, 243 nt, synthetic construct
  source 1..243: mol_type = other RNA
atccagggcagcctgaccttcaaggacgtggccatgaacttcacccaggaggagtggtgcctgctggaccacagccagaaggagctgtacctggaggtgatgctggagaacgtgcagaacctgctgagcgtgggcctgcccgtgcccagggagtactacaccagctacttccagcaggagaaggccccctggctgctggtgcagaagggccccaggaacagcagccccgaggccgagaccaac

SEQ ID NO: 19747 - RNA, 243 nt, synthetic construct
  source 1..243: mol_type = other RNA
ccccccaggcaggagagggtgaccttcggcgacgtggccgtggacttcaccctggacgagtgggtgtgcctggacagcgcccagaaggccctgtacagggacgtgatgctggagaactacggccacctggtgtgcctgggcctggccggcgccaagcccgccgtgatccagaggctggagaggggcgaggccgcctggtgccccggcgtgcccggcagcaggctgcccggcctgttcttcttc

SEQ ID NO: 19748 - RNA, 243 nt, synthetic construct
  source 1..243: mol_type = other RNA
ttccaggagagcgtgaccttcaaggacgtggccgtggacttcacccaggaggagtggaagcagctggaccccgcccagagggacctgtacagggacgtgatgctggagaactacaggaacctggtgagcctgggcctgcccgtgttcaagcccgacgtgatcagccagctggagaggggcgaggccccctggatccccgaggtgcccaggagcatctgccagggcgaggtggtgaggaccagg

SEQ ID NO: 19749 - RNA, 243 nt, synthetic construct
  source 1..243: mol_type = other RNA
atggagaccctgaccttcagggacgtggccatcgagttcagcctggaggagtggcagtgcctggacatcgcccagcaggacctgtacaggaaggtgatgctggagaactacaggaacctggccttcctgggcatcgccctgaccaagcccgacctgatcacctgcctggagcagaggaaggtgccctggaacatgaagaggcacgagatggccgacgagccccccgtgctgtgcagcaacttc

SEQ ID NO: 19750 - RNA, 243 nt, synthetic construct
  source 1..243: mol_type = other RNA
ccccaggccagcgtgaccttcaaggacgtggccgtggacttcacctgggaggagtggaggctgctggaccccagccagaaggagctgttctgggaggtgatgctggagaactacaggaacctggtgtgcctgggcctggccgacagcaacaaggacgtgaggatcagcgagctggagagcggcgagccccactggatccccaccggcggcgtgctgaggagctgctggcccggctgggagagc

SEQ ID NO: 19751 - RNA, 243 nt, synthetic construct
  source 1..243: mol_type = other RNA
cccgcccaggtgctggtgaccttcaaggacgtggccgtggacttcacccaggaggagtggaggctgctggacccccaccagaaggagctgtacaaggaggtgaccctggagaacgcctggaacatgctgagcatgggcctgcccgtgcccagggacctggtgagccacttcaagcaggtggaggccccctggatgctggaggaggagggcagcagcaacagctgcctggacggcgagaggagg

SEQ ID NO: 19752 - RNA, 243 nt, synthetic construct
  source 1..243: mol_type = other RNA
ccccaggagctggtgaccttcagggacgtggccgtggacttcacccccgaggagtggggccagctgggccccgcccagaaggagctgtaccaggaggtgatgctggagaactacaggaacctggtgtgcctgggcctgaccgtgagcaagcccgacgtgatcagccagctggagcagggcgaggccccctggaggctggagggcggcagcgccaggggcaggtgcctggactggggcatgagg

SEQ ID NO: 19753 - RNA, 243 nt, synthetic construct
  source 1..243: mol_type = other RNA
tgccaggagaccctgaccttcaaggacgtggccgtggacttcaccagggaggagtggggccagctgggccccgcccagagggacctgtacaaggaggtgatgctggacaactacaggaacctgatcagcctgggcctgcagggcagcaagcccgacgtgatcttctggctggagaggggccagagcccctggaccctgaagaggaggaagagcagggactgctgccccgagttccacctgcac

SEQ ID NO: 19754 - RNA, 243 nt, synthetic construct
  source 1..243: mol_type = other RNA
ccccaggagctggtgaccttcgaggacgtggccgtgtacctgaccaaggaggagtgggagcacctgggccccgcccagaggaggctgtacagggacgtgatgctggagaactacgagaacgtggtgagcctgggcttccccgtgagcaagcccgacctgatcagccagctggagcagggcgaggtgccctgcctgcccgacctgcccaggaccgaggtgcccgagatccacggcggccccctg

SEQ ID NO: 19755 - RNA, 243 nt, synthetic construct
  source 1..243: mol_type = other RNA
ttccagggcagcgtgaccttcagggacgtggccatcgacttcagccaggaggagtggaagtggctgcagcccgcccagagggacctgtacaggtgcgtgatgctggagaactacggccacctggtgagcctgggcctgagcatcagcaagcccgacgtggtgagcctgctggagcagggcaaggagccctggctgggcaagaggaacgtgaacagggacctgcaggccctgtgcatccccatc

SEQ ID NO: 19756 - RNA, 243 nt, synthetic construct
  source 1..243: mol_type = other RNA
gcccagatgctggtgaccttcaaggacgtggccgtgaccttcacccaggaggagtggaggcagctggacctgacccagaggaccctgtacagggaggtgatgctggagacctgcggcctgctggtgagcctgggccacagggtgcccaagcccgagctggtgcacctgctggagcacggccaggagctgtggaccgtgaagaggggcctgagcgaccccacctgcgccggcgacaggacccag

SEQ ID NO: 19757 - RNA, 243 nt, synthetic construct
  source 1..243: mol_type = other RNA
atggagctggtgaccttcgaggacgtggccgtgtacttcaccaggaaggagtggggctggctggaccccgcccagagggacctgtacagggacgtgatgctggagaactacggcaacttcgtgagcatgggcctgcccttcagcaagcccgacgtgatcagccagctggagcagggcgaggagagctgggtggaggacctgcaggagtgcgaggagggcgagttcagccccgtggtgcacagc

SEQ ID NO: 19758 - RNA, 243 nt, synthetic construct
  source 1..243: mol_type = other RNA
gcctgggaggtggtgaccttccaggacgtggccgtggacttcaccagggaggagtggaggctgctgagccccccccagaaggagctgtacaaggaggtgatgctggagaacgtgaggaacctgctgagcgtgggcctgcccgccccccccgacgacgtggtgagctacctggagcagagggagggccccagcatgctggaccaggaggacctgaggacctgcggccccgagggcgagatcagg

SEQ ID NO: 19759 - RNA, 243 nt, synthetic construct
  source 1..243: mol_type = other RNA
cagctgggcagcgtggccttcgaggacgtggccgtggacttcacccaggaggagtggggctacctggcccccgcccagagggacctgcacagggaggtgatgctggagaactacaggaacctggtgttcctgggcctggtggccagcaagcccgacgtgatctgccacctggagcagaggaaggagccctggagcctgaggggcatcgagaagaggaaggccctgaggggcacctgccccgac

SEQ ID NO: 19760 - RNA, 243 nt, synthetic construct
  source 1..243: mol_type = other RNA
gcccaggtgctggtgaccttccaggacgtggccgtggacttcacccaggaggagtggaggctgctggaccccggccagaaggagctgtacaaggaggtgatgctggagaacgtgcagaacgtgctgagcctgggcctgcccgtgcccagggaggactggttcttccacttccacgagggcggcgacccctggatgctggagggcaagggccccagcatcagcaggctggacgaggagaggcac

SEQ ID NO: 19761 - RNA, 243 nt, synthetic construct
  source 1..243: mol_type = other RNA
agccaggtgagcctgaccttcagggacgtggccgtggacttcagccaggaggagtggggcctgctggagcccgcccagaaggacatgtacagggacgtgatgctggagaactacgagaacttcctgagcctgggcctgcccatcagcaagcccaacatgatcagccagctgaagaggagggaggcccccagctggatcgccgagggcaaggtgagcctgagcacctacctgggcaccctgagg

SEQ ID NO: 19762 - RNA, 243 nt, synthetic construct
  source 1..243: mol_type = other RNA
ttccaggagcccgtgagcttcaaggacgtgagcgtggtgttcaccgaggaggagctgggcctgctggacagcgcccagaggaagctgtacagggacgtgatgctggagaacttccagaacctgctgagcgtgggcaaccagcccttcaagcccgagctgatcttccagctggagagggaggaggagctgctgatgatggagaccgagacccagagggacggctgcagcggcaccaagagccag

SEQ ID NO: 19763 - RNA, 243 nt, synthetic construct
  source 1..243: mol_type = other RNA
agcctgggcagcgacctgttcagggacgtggccgtggtgttcagccaggaggagtgggagcagctggcccccgcccagagggacctgtacagggacgtgatgctggagatctacagcaacctggtgagcctgggcttcgccatcagcaagcccgacgtgatcagcttcctggagcagggcagggagccctggatggtggagaaggtggtgaccggcggccagtgccccgtgctggagagcagg

SEQ ID NO: 19764 - RNA, 243 nt, synthetic construct
  source 1..243: mol_type = other RNA
agcgaggagaccgtgaccttcaaggacgtggccgtggacttcacctgggaggagtggaagcagctgacccccgtgcagagggacctgtacagggacgtgatgctggagaactaccagaacctggtgagcctgggcctgcccgtgttccagagcgacctgatcagccagctggagaggggcgaggtgccctggatccccgagggcgagaccttcaggggcccctgccccggcagcatcaaccag

SEQ ID NO: 19765 - RNA, 243 nt, synthetic construct
  source 1..243: mol_type = other RNA
ctgcagggcagcgtgagcttcaaggacgtgaccgtggacttcacccaggaggagtggcagcagctggaccccgcccagaaggccctgtacagggacgtgatgctggagaactactgccacttcgtgagcgtgggcttccacatgaccaagcccgacatgatcaggaggctggagcagggcgaggagctgtggaccgagaggatcttccccggccagagctacctggaggaggacggcaaggcc

SEQ ID NO: 19766 - RNA, 243 nt, synthetic construct
  source 1..243: mol_type = other RNA
acccaggtgagcgtgaccttcgacgacgtggccgtgaccttcacccaggaggagtggggccacctggaccccgcccagaggaccctgtacagggaggtgatgctggagacctgcaggctgctggtgagcctgggctgccccgtgcccaggcccgagctgatctacaggctggagcacggccaggagctgtggaccgtgaagagggacctgagcaggagcacctgcgccgtggacgagggcaag

SEQ ID NO: 19767 - RNA, 243 nt, synthetic construct
  source 1..243: mol_type = other RNA
gagcccggcgccgtgagcttcgccgacgtggccgtgtacttcagccccgaggagtgggagtgcctgaggcccgcccagagggccctgtacagggacgtgatgagggagacctacggccacctgggcgccctgggcttccccggccccaagcccgccctgatcagctggatggagcaggagagcgaggcctggagccccgccgcccaggaccccgagaagggcgagaggctgggcggcgccagg

SEQ ID NO: 19768 - RNA, 243 nt, synthetic construct
  source 1..243: mol_type = other RNA
ttccagggccccgtgaccttcagggacgtggccatcgacttcagccaggaggagtggaagtggctgcagcccgcccagagggacctgtacaggtgcgtgatgctggagaactacggccacctggtgagcctgggcctgagcatcagcaagcccgacgtggtgagcctgctggagcagggcaaggagccctggctggagcagggcgacgtgaggaggaacctgttcagcgtgagccagagcaac

SEQ ID NO: 19769 - RNA, 243 nt, synthetic construct
  source 1..243: mol_type = other RNA
ctgcaggagcccgtgaccttcgccgacgtggccgtgctgttcacccccgaggagtggatgttcctggacagcgcccagaggagcctgtacagggacgtgatgctggagaactacaggaacctggccagcgtgggcgaccagctgggcaagcccagcatgctgagcctgagcgagcccggcgaggagctgtgggcccccgagaggaggaccttccccggcaccaggcccgagccccagcaccag

SEQ ID NO: 19770 - RNA, 243 nt, synthetic construct
  source 1..243: mol_type = other RNA
aggagggagagcgtgaccttcgaggacgtggccgtgtacttcagcgagaacgagtggatcggcctgggccccgcccagagggccctgtacagggacgtgatgctggagaactacggcgccgtggccagcctggccttccccttccccaagcccgccctgatcagccagctggagaggggcgagaccccctggtgcagcgtgccccagggcgccctggacggcgaggcccccaggggcatcagc

SEQ ID NO: 19771 - RNA, 243 nt, synthetic construct
  source 1..243: mol_type = other RNA
atggtgaccttcgaggacgtggccgtgcacttcaccaagaccgagtggaccggcctgagccccgcccagagggccctgtacaggagcgtgatgctggagaacttcggcaacctgaccgccctgggctaccccgtgcccaagcccgccctgatcagcctgctggagggcggcgacatggcctggggcctggaggcccaggacgaccccctggccgagaccaccaagaacgtgtgcaaggacgtg

SEQ ID NO: 19772 - RNA, 243 nt, synthetic construct
  source 1..243: mol_type = other RNA
ttcgaggagctggtgaccttcgaggacgtgctggtggacttcagccccgaggagctgagcagcctgagcgccgcccagaggaacctgtacagggaggtgatgctggagaactacaggaacctggtgagcctgggccaccagttcagcaagcccgacgtgatcagcaggctggaggaggaggagagccacgccatggagaccgacagcaggcacaccgtgatctgccccggcgagagccacgac

SEQ ID NO: 19773 - RNA, 243 nt, synthetic construct
  source 1..243: mol_type = other RNA
aggcccagggccgtgaagttcgccgacgtggccgtgtacttcagccccgaggagtggggctgcctgaggcccgcccagagggccctgtacagggacgtgatgagggagacctacggccacctgagcgccctgggctgcagcggccccaagcccgccctgatcagctggctggagaggaacaccgacgactgggagcccgccgccctggacccccaggagtgccccaggggcctgaccgtgcag

SEQ ID NO: 19774 - RNA, 243 nt, synthetic construct
  source 1..243: mol_type = other RNA
agcctggagagcgacctgttcagggacgtggccatcgtgttcagccaggaggagtgggagcagctggcccccgcccagagggacctgtacagggacgtgatgctggagacctacagcaacctggtgagcctgggcctggccatcgccaagcccgacgtgatcagcttcctggagcagggcaaggagccctgggtggtggagaagatgagcaggggcggcctgtgccccgtgctggagagcagg

SEQ ID NO: 19775 - RNA, 243 nt, synthetic construct
  source 1..243: mol_type = other RNA
agccagggcctggtgaccttcagggacgtggccctggacttcagccaggaggagtgggagtggctggaccccagccagaaggacctgtacagggacgtgatgctggagaactacaggaacctggtgtgcctgggcctgagcatcagcaagcccaacatgatcagcctgctggagcagggcaaggagccctggatggtgcagagggagatgagcgacgacccctacaccgactgggagagctgg

SEQ ID NO: 19776 - RNA, 243 nt, synthetic construct
  source 1..243: mol_type = other RNA
gagatggtgaccttcaaggacgtggccgtggtgttcaccgaggaggagctgggcctgctggacagcgcccagaggaagctgtacagggacgtgatgctggagaacttcaggaacctgctgctggtggcccaccagcccttcaagcccgacctgatcagccagctggagagggaggagaagctgctgatggtggagatggagacccccaaggacggctgcagcggcaggaagaaccagcagaag

SEQ ID NO: 19777 - RNA, 243 nt, synthetic construct
  source 1..243: mol_type = other RNA
ccccaggagagcgtgaccttcaaggacatcgccgtggacttcacccaggaggagtgggccctgctggacaccagccagaggaagctgtacagggacgtgatgctggagaacatcagccacctggtgagcgtgggctaccacctgtgcaagagcgacgtggtgagccagctggagcagggcgtggagctgtggagggagggcaggggcttcccccagggccccaaccccgacaggaagagcggc

SEQ ID NO: 19778 - RNA, 243 nt, synthetic construct
  source 1..243: mol_type = other RNA
gcccagggcagcgtggtgttcagcgacgtgagcgtggacttcagccaggaggagtgggagtgcctggacagcggccagagggacctgtacagggacgtgatgctggagaactacagcaacctgctgagcatgggcttctacatccccaagccccccgtgatcagcctgctggagcagggcaaggagccctggatggtgggcagggagctgaccaagggcctgtgcagcgacctggagagcatg

SEQ ID NO: 19779 - RNA, 243 nt, synthetic construct
  source 1..243: mol_type = other RNA
agcaaggcccccgtgaccttcggcgacctggccatctacttcagccaggaggagtgggagtggctgagccccatccagaaggacctgtacgaggacgtgatgctggagaactaccagaacctggtgagcctgggcctgagcttcaggaggcccaacgtgatcgccctgctggagaagggcaaggccccctggatggtggagcccgtgaagaggaggaggggcctggacagcggcagcaagtgc

SEQ ID NO: 19780 - RNA, 243 nt, synthetic construct
  source 1..243: mol_type = other RNA
gccagggccagcctgagcttcgaggacgtggccgtgggcttcagctgggaggagtggcagctgctggcccccagccagaaggacctgtacagggacgtgatgctggagaactacaggaacctggtgagcgtgggctaccaggccagcaagcccgacagcgtgttccagctggagcagggcgagcccccctggatggtggagggcgccgcccagagccagacctgccagggctaccccgccacc

SEQ ID NO: 19781 - RNA, 243 nt, synthetic construct
  source 1..243: mol_type = other RNA
agccacggccccctgagcttcgaggacgtggccatcgccttcaccaaggaggagtggcagcagctggaccccgcccagaggaccctgtacagggacgtgatgctggagaacttcagccacctggtgagcctgggccaccccgtgagcaagcccgacatcatcagcaagctggagcagggcgaggagccctggatcatcaagaggcacatcagcgactggatctgccccgagagggagaccagg

SEQ ID NO: 19782 - RNA, 243 nt, synthetic construct
  source 1..243: mol_type = other RNA
agccaggagcccgtgaccttcgaggacgtggccgtgtacttcacccagaaccagtgggccagcctggaccccatgcagagggccctgtacctggaggtgatgctggagaactacgccaacatcaccagcctggccgccctgcccttccccaagcccgacctgatcctgcagctggagcagggcggcgccccctggggcctggacccctggacccccctggagggcgaggccctgggcggcgtg

SEQ ID NO: 19783 - RNA, 243 nt, synthetic construct
  source 1..243: mol_type = other RNA
atgctgatgatgttcagggacgtggccgtggacttcagccaggaggagtgggagtgcctggacctggagcagaggggcctgtacagggacgtgatgctggagaactacagcaacatggtgagcctgggcctgtgcatctaccagcccgaggccttcagcctgctggagaagggcaaggagccctggaagatcctgagggacgagaccaggggcccctgccccgacatgcagagcaggtgccag

SEQ ID NO: 19784 - RNA, 243 nt, synthetic construct
  source 1..243: mol_type = other RNA
caggccgaggtgaccttcgaggacgtggccgtgctgctgagcagggaggagtggggcaggctgggccccgtgcagaagggcctgtacagggacgtgatgctggagacctacaggaacctggtgagcctgggcgccggccccgccggccccaagcccgaggtgatcacccagctggagaggggcgacgagccctgggtgcccgacgtgcagggcagggagaggcccaccatcgacggcagcgcc

SEQ ID NO: 19785 - RNA, 243 nt, synthetic construct
  source 1..243: mol_type = other RNA
gaggaggtgcccgtggtgttcgaggacgtggccgtgtacttcaccagggaggagtggggcaccctggacaagaggcagaaggagctgtacagggacgtgatgaggatgaactacgagctgctggccagcctgggccccgccgccgccaagcccgccctgatcagcaagctggagaggagggccgccccctggatccaggaccccaacggccccaagtggggcaagggcaggccccccggcaag

SEQ ID NO: 19786 - RNA, 243 nt, synthetic construct
  source 1..243: mol_type = other RNA
ccccaggagcccgtgaccttcgaggacgtggccgtgtacttcacccagaaccagtgggccagcctggaccccatgcagagggccctgtacagggaggtgatgctggagaactacaccaacatggccagcctggccttccccttccccaagcccgtgctggtgagccacctggagaggggcgaggccccctggggccccgacccctgggaggccgaggtgctgaggggcatctgccccggcggc

SEQ ID NO: 19787 - RNA, 243 nt, synthetic construct
  source 1..243: mol_type = other RNA
ttccaggtgctggtgagcttcgaggaggtggccgtgctgctgagccaggaggagtggggccacctgggccccgcccagaagaggctgtacagggacgtgatgctggagacctacggcaacctggtgagcctgggcctgcagggcagcaagcccgacgtgatcagcaagctggagcagggcgaggagccctggaccccccacagccccaggatcgagggcagctggatcaggaggaggaggccc

SEQ ID NO: 19788 - RNA, 243 nt, synthetic construct
  source 1..243: mol_type = other RNA
gcccaggagagcgtggtgttcagcgacgtgagcatcgacttcagccaggaggagtgggagtgcctgaacgacgaccagagggacctgtacagggacgtgatgctggagaactacagccacctggtgagcatggccggccacagcgtgagcaagcccgacgtgatcagcgtgctggagcagggcaaggagccctggctggtggacagggagctgaccagggagcagtggcccgtgctggagagc

SEQ ID NO: 19789 - RNA, 243 nt, synthetic construct
  source 1..243: mol_type = other RNA
aagagcgccgccgtgagcttcagcgacgtggccgtgtacttcagcctggaggagtggggctgcctgaggcccgcccagagggccctgtacagggacgtgatgagggagacctacggccacctgggcgccctgggcttccccggccccaagcccgccctgatcagctggatggagcaggagagcgaggcctggagccccgccgcccaggaccccgaggagggcgagagcctgggcggcgccctg

SEQ ID NO: 19790 - RNA, 243 nt, synthetic construct
  source 1..243: mol_type = other RNA
ctgcagggcagcgtgagcttcaaggacgtgaccgtggacttcacccaggaggagtggcaccagctgaaccccgcccagaaggccctgtacagggacgtgatgctggagaactactgccacttcatcagcgtgggcttccacatgaccaagcccgacatgatcaggaagctggagcagggcgaggagctgtggaccgagaggatcttcagcaggcagagccacctggaggaggacggcaaggcc

SEQ ID NO: 19791 - RNA, 243 nt, synthetic construct
  source 1..243: mol_type = other RNA
agccagagcctggtgaccttcggcgacgtggccgtggagttcagccccgaggagtgggagtggctggacagcgcccagaggagcctgtacaggagcgtgatgctggagaactacaggagcctggtgagcctgggcctgtgcgtgagcaagcccaagatgatcagcagcctggagcagaggaaggagccctgggtggccaagaggaccctgaccaggggcggctgccccgacagcagggccctg

SEQ ID NO: 19792 - RNA, 243 nt, synthetic construct
  source 1..243: mol_type = other RNA
ccccaggagcccgtgaccttcgaggacgtggccgtgctgttcacccccgaggagtggatgttcctggacagcgcccagaggagcctgtacagggacgtgatgctggagaactacaggaacgtggccagcgtgggcgaccagctgggcaagttcagcagcttcagccacctggagcagggcgaggagtggtggcccaccgagaggagggtgttccccggcagctgccccgagcccagcctgccc

SEQ ID NO: 19793 - RNA, 243 nt, synthetic construct
  source 1..243: mol_type = other RNA
ttccaggtgagcgtgaccttccaggacgtggccgtggacttcagcagggacgagtggaagaggctggacgacgcccagaaggccctgtacagggacgtgatgctggagaactacgagaacctggtgagcctgggcctgcccgtgagcaagctggacgtgatcagcctgctggagaggagggaggcccccaggagggccaaggagagggtgcccagggacctgccccccgacagcatcagccag

SEQ ID NO: 19794 - RNA, 243 nt, synthetic construct
  source 1..243: mol_type = other RNA
caccaggaggtggtgaccttcgaggacgtggccgtgtacttcacccagaccgagtgggccggcctgagccccgcccagagggccctgtacaggagcgtgatgctggagatctacggcaacctgaccagcctgggctaccccgtgcccaagcccgccctggtgagcctgctggagaggggcgagctgccctggggcctggagaccagggacgacccccccgcccagggcaccaaggacatctgc

SEQ ID NO: 19795 - RNA, 243 nt, synthetic construct
  source 1..243: mol_type = other RNA
ttccaggacttcgtgagcttcaacgacgtgagcgtgaacttcaccgaggaggagtggagggagctggaccccgtgcagagggtgctgtacagggacgtgatgctggagaactacaggaacctggtgagcctgggcttccccttcagcaagcccgacatcatcagccagctggagcaggccgtgaacccctggatgcaggagggcgaggtgctgaggggcagctgcacccacctggagaccagg

SEQ ID NO: 19796 - RNA, 243 nt, synthetic construct
  source 1..243: mol_type = other RNA
ttccaggaggccgtgaccttcaaggacgtggccgtgaccttcaccgaggaggagctgggcctgctggacagcacccagaggaagctgtacagggacgtgatgctggagaacttcaggaacctgctgctggtgggcaaccagcccttcaagcccgagctgatcttccagctggagagggaggagatgctgctgatgctggagaccgagatccagaggggcaccaagagccaccacagcctggag

SEQ ID NO: 19797 - RNA, 243 nt, synthetic construct
  source 1..243: mol_type = other RNA
agcaaggcccccgtgaccttcggcgacctggccatctacttcagccaggaggagtgggagtggctgagccccatccagaaggacctgtacgaggacgtgatgctggagaactaccagaacctggtgagcctgggcctgtgcttcaggaggcccaacgtgatcaccctgctggagaagggcaaggccccctggatggtggaccccgtgaagaggaggaggggcctggacctgggcagcaagggc

SEQ ID NO: 19798 - RNA, 243 nt, synthetic construct
  source 1..243: mol_type = other RNA
gccagggagagcgtggtgttcagcgacgtgagcatcgccttcagccaggaggagtgggcccacctggacctggagcagaaggacctgtacagggacgtgatgctggagaactacagcaacctggtgagcctggccggctgcttcgtgagcaagcccgacgtgatcagcctgctggagcagggcaaggagccctggaagatcgtgaggaagggcaggaggaggtaccccgacctggagaccagg

SEQ ID NO: 19799 - RNA, 243 nt, synthetic construct
  source 1..243: mol_type = other RNA
agccaggagcccgtgagcttcctggacgtggccgtggacttcacccaggaggagtggcagcagctggaccccgtgcagaggaccacctacagggacgtgatgctggagaactacagccacctggtggccctgggctacgacagcgccaagcccaacgtgatcgtgaagctggagcagggcgaggagccctgggtggccgagggcgacctgccctgcaggagcaggcccgaggaggtgtggcag

SEQ ID NO: 19800 - RNA, 243 nt, synthetic construct
  source 1..243: mol_type = other RNA
agccagcacctggtgaccttcgaggacgtggccgtgaacttcacccaggaggagtggaccctgctggaccagacccagagggacctgtacagggacgtgatgctggagaactaccagaacctgatggccctggccggcagcgagagctgcaagccccacgtgaacagccccctggagggcgccgaggagctgaggaccagggccaggaggatcctgcagagcgagttcatggccgagagcgac

SEQ ID NO: 19801 - RNA, 243 nt, synthetic construct
  source 1..243: mol_type = other RNA
ccccaggagctggtgaccttcgaggacgtggccgtgtacctgagcaaggaggagtggggcctgctggaccccgcccagaggaggctgtacagggacgtgatgctggagaactacggcaacgtggccagcctgggcctgcccgtgagcaagcccgacctgatcagccagctggagaggaccgacctgcccctggtgcccaggctgccccagaccgagatcgaggacctgttcgacgagaagctg

SEQ ID NO: 19802 - RNA, 243 nt, synthetic construct
  source 1..243: mol_type = other RNA
ctgaagggcctggtgaccttcgaggacgtggccgtggagttcacccaggaggagtgggccctgctggaccccgcccagaggaccctgtacagggacgtgatgctggagaacttcaggaacctggccagcctgggcgaccaggtggacaagcccggcctgatcgcccagctggagcaggaggacaaggtgatgaccgaggagaggggcatcctgcccggcacctgccccgacgtggagaacccc

SEQ ID NO: 19803 - RNA, 243 nt, synthetic construct
  source 1..243: mol_type = other RNA
aagcccggcgccgtgagcttcgccgacgtggccgtgtacttcagccccgaggagtggggctgcctgaggcccgcccagagggccctgtacagggacgtgatgagggagacctacggccacctgggcgccctgggcttccccggccccaagcccgccctgatcagctggatggagcaggagagcgaggcctggagcagcgccgcccaggaccccgagaacggcgagagcctgggcggcgccagg

SEQ ID NO: 19804 - RNA, 243 nt, synthetic construct
  source 1..243: mol_type = other RNA
gagcaggagcccgtgaccttcaaggacgtggccgtggacttcacccaggaggagtggggccagctggacctggtgcagaggaccctgtacagggacgtgatgctggagacctacggccacctgctgagcgtgggcaaccagaccgccaagcccgaggtgatcagcctgctggagcagggcgaggagccctggagcgtggagcagacctgcccccagagggcctgccccgagtggatgaggaac

SEQ ID NO: 19805 - RNA, 243 nt, synthetic construct
  source 1..243: mol_type = other RNA
agccagggcaccgtgagcttcaaggacgtggccgtgaacttcacccaggaggagtggcagtacctggacctgccccagagggacctgtacaaggacgtgatgctggagaactacaccaacctgatcagcgtgggctaccagaccaccaagcccagcgtgatccacaagctggagcagggcgaggagccctggatggtggagagggagatccccaactggagctacgccgaggagacctggcag

SEQ ID NO: 19806 - RNA, 243 nt, synthetic construct
  source 1..243: mol_type = other RNA
atggtgagcttcgaggacgtggccgtgctgctgagccaggaggagtgggactgcctgatccccgcccagaggggcctgtacagggacgtgatgctggagacctacggcaacctggtgagcctgggcctgcaggccagcaagcccgacgtgatcagcaggctggagcagggcgacgagccctggaccacccacaccctgaggacccagggcagctggagctggaggcacaagagggagggctac

SEQ ID NO: 19807 - RNA, 243 nt, synthetic construct
  source 1..243: mol_type = other RNA
gcccaggagaccgtgaccttcaaggacgtggccgtggacttcacccaggaggagtggggccagctggaccccgtgcagaggaccctgtacagggacgtgatgctggagacctacggccacctgctgagcgtgggcaaccagatcgccaagcccgaggtgatcagcctgctggagcagggcgaggagccctggagcatggagagggtgtaccccccccagaggacctgccccgagtggatgagg

SEQ ID NO: 19808 - RNA, 243 nt, synthetic construct
  source 1..243: mol_type = other RNA
agcaaggccagcgtgaccttcgccgacctggccgtgtacttcagccaggaggagtgggagggcctgagccccatccagaaggacctgtacgaggacgtgatgctggagacctaccagaacctggtgagcgtgggcctgagctgcaggaggcccagcgtgatcaccctgctggagaagggcaaggccccctggaccgtggagcccgccaggcagaggaggggccccgacagcggcgccaagtgc

SEQ ID NO: 19809 - RNA, 243 nt, synthetic construct
  source 1..243: mol_type = other RNA
tggaaggagctgctgagcttcgaggacgtggccatgtacttcaccagggaggagtggaacaggctggactgggcccagaaggacctgtacagggacgtgatgctggagaactacaggaacatgatcctgctgggcttccagttccccaagcccgaggtgatctgcctgctggagcagtgggaggagccctggatcctggacctgcccagggccggcaccaggaaggccagcagcagcgcctgc

SEQ ID NO: 19810 - RNA, 243 nt, synthetic construct
  source 1..243: mol_type = other RNA
gccctgaggagcgtgatgttcagcgacatcagcatcgacttcagccccgaggagtgggagtacctggacctggagcagaagaacctgtacagggacgtgatgctggagaactacagcaacctggtgagcctgggctgcttcatcagcaagcccgtggtgatcagcctgctggagcagggcaaggagccctggaaggtggtgaggaagaggaggcagtaccccgacctggagaccaagtacgag

SEQ ID NO: 19811 - RNA, 243 nt, synthetic construct
  source 1..243: mol_type = other RNA
agccaggagagcgtgagcttcgaggacgtggccgtgtacttcacccagaaccagtgggccagcctggacagcgcccagaggaccctgtacaggaaggtgatgctggagaactacgccaacgtgaccagcctggccgccttccccttccccaagcccgacctgatcctgcagctggagcagggcgaggcccccggcggcctggacccctggacccccatcaggagggaggtgaggggcgtgtgc

SEQ ID NO: 19812 - RNA, 243 nt, synthetic construct
  source 1..243: mol_type = other RNA
ctggtgttcgaggacgtggccatcaacttcacccccgaggagtgggccctgctggaccccgcccagaggaggctgtacagggacgtgatgctggagaccttcaagaacctggccttcgtgggcagctgcctgcacgtgaagaccagcggcagcagcgcccagagggacatcctggagaacgtgctgtgcagcgaggagaagatcgtgaggttcaagaggaacgacagcaagagcgtgctgggc

SEQ ID NO: 19813 - RNA, 243 nt, synthetic construct
  source 1..243: mol_type = other RNA
atggagggcctggtgatgttccaggacctgagcatcgacttcagccaggaggagtgggagtgcctggacgccgcccagaaggacctgtacagggacgtgatgatggagaactacagcagcctggtgagcctgggcctgagcacccccaagcccgacgtgatcagcctgctggagcagggcaaggagccctggatggtgagcagggacgtgctgggcggctggtgccccgacaggctgaagaag

SEQ ID NO: 19814 - RNA, 243 nt, synthetic construct
  source 1..243: mol_type = other RNA
ttccaggagagcgtggtgttcagcgacgtgagcatcgccttcagccaggaggagtgggcccacctggacctggagcagaaggacctgtacagggacgtgatgctggagaactacagcaacctggtgagcctgggctgcttcgtgagcaagcccgacgtgatcagcctgctggagcagggcaaggagccctggaagatcgtgaggaagggcaggaggaggtaccccgacctggagaccaggtac

SEQ ID NO: 19815 - RNA, 243 nt, synthetic construct
  source 1..243: mol_type = other RNA
ccccccagcctggtgaccttcggcgacgtggccatcgacttcagccaggaggagtgggagtggctgaacagcgcccagaggaccctgtacaggaacgtgatgctggagaactacaggaacctggccagcctgggcctgtgcggcagcaagcccgacatgatcagcagcctggagcagaggagggagccctggatcaccaagaggaagctgaccaggggcaggtgccccgacctgaaggccgtg

SEQ ID NO: 19816 - RNA, 243 nt, synthetic construct
  source 1..243: mol_type = other RNA
gagaagggccccctgaccttcagggacgtggtgatcgagttcagccaggaggagtggcagtgcctggacaccgcccagcaggacctgtacaggaaggtgatgctggagaacttcaggaacctggtgttcctgggcatcgacgtgagcaagcccgacctgatcacctgcctggagcagggcaagaacccctggaacatgaagaggcacagcatggtggccaccccccccggcgtgttcttcgtg

SEQ ID NO: 19817 - RNA, 243 nt, synthetic construct
  source 1..243: mol_type = other RNA
ccccagaagagcgtgaccttcgaggacgtggccgtgtacttcacccaggccgagtgggacggcctgagccccgcccagaggaccctgtacagggacgtgatgctggagaactacggcaacgtggccagcctgggcttccccctgctgaagcccgccgtgatcagccagctggagggcggcggcgacctgggcggccccagccccctggccgccggcaccggcctgcagggcctgaggaccgtg

SEQ ID NO: 19818 - RNA, 243 nt, synthetic construct
  source 1..243: mol_type = other RNA
aagcccggcaccgtgagcttcgccgacgtggccgtgtacttcagcagggaggagtggggctgcctgaggcccgcccagagggccctgtacagggacgtgatgagggagacctacggccacctgggcgccctgggcgtgggcggcagcaagcccgccctgatcagctgggtggaggaggccgccgagctgtgggaccccgccgccagggaccccgaggtgaccaagtgccccaccgagaccgac

SEQ ID NO: 19819 - RNA, 243 nt, synthetic construct
  source 1..243: mol_type = other RNA
gtgcacggcagcgtgaccttcagggacgtggccatcgacttcagccaggaggagtgggagtgcctgcagcccgagcagaggaccctgtacagggacgtgatgctggagaactacagccacctgatcagcctgggcagcagcgtgagcaagcccgacgtgatcaccctgctggagcaggagaaggagccctggatcgtggtgaggaaggagaccagcaggtggtaccccgacctggagagcaag

SEQ ID NO: 19820 - RNA, 243 nt, synthetic construct
  source 1..243: mol_type = other RNA
tgcaaggagagcgtgatcttcaaggacgtgtgcgtgaacttcagcctggaggagtgggagtgcctggacctgacccagaggaacctgtacaggtgcgtgatgctggagaactacagcaacctggtgagcgtggtgggcctgagcatccccaagcccgacgtgatcagcctgctggagcagggcaaggagccctggggcgtgttcgacagcgagatgaccaggggcctgaaccaggactgcggc

SEQ ID NO: 19821 - RNA, 243 nt, synthetic construct
  source 1..243: mol_type = other RNA
aggagggagcccgtgaccttcgaggacgtggccgtgtacttcagcgagaacgagtggagcagcctggcccccgcccagagggccctgtacagggacgtgatgctggagaactacggcgccgtggccagcctggccttcagcttccccaagcccgccctgatcagccagctggagaggggcgaggccccctggagcctggccccccagggcgccctggacggcgagggcagcaggggcatcagc

SEQ ID NO: 19822 - RNA, 243 nt, synthetic construct
  source 1..243: mol_type = other RNA
aagcccggcgccgtgagcttcgccgacgtggccgtgtacttcagccccgaggagtggggctgcctgaggcccgcccagagggccctgtacagggacgtgatgagggagacctacggccacctgggcgccctgggcttcaggggcaccaagcccgccctgatctgctgggtggaggaggaggccgacctgtggggccccgaggccagggaccccgaggtgggcgcctgcctgaccgaggccgac

SEQ ID NO: 19823 - RNA, 243 nt, synthetic construct
  source 1..243: mol_type = other RNA
agccaggtgagcgtgaccttcgaggacgtggccgtgctgttcagcagggacgagtggaggaggctgggccccagccagaagaacctgtaccaggacgtgatgctggagaactacagcaacctggtgagcctgggcctgcccttcagcaagcccaaggtgatcagcctgctgcagcagggcgaggacccctggaaggtggagaaggagagccccggcagcttccccggctgcaagagcagcccc

SEQ ID NO: 19824 - RNA, 243 nt, synthetic construct
  source 1..243: mol_type = other RNA
agccagggcagcgtgaccttcagggacgtggccgtggacttcagcagggaggagtgggagtggctgcagcccgcccagagggacctgtacaggcacgtgatgctggagaactacggccacctggtgagcctgggcctgaacatcagcaagccccacgtggtgagcctgctggagcagggcaaggagccctggctgggcaaggacgccagcaggggcctgttcagcgccagcgagagcaacggc

SEQ ID NO: 19825 - RNA, 243 nt, synthetic construct
  source 1..243: mol_type = other RNA
gcccacggcagcctgatgttcagcgacgtgagcatcgtgttcagccaggaggagtgggagtgcctggacctggagcagagggacctgtacagggacgtgatgctggagaactacaccaacctggtgagcctgggctgcttcatcagcaagcccgacgtgatcagcctgctggagcagggcaaggagccctggaaggtggtgaggaagaggaggggccagtacgccgacctggagaccaggtac

SEQ ID NO: 19826 - RNA, 243 nt, synthetic construct
  source 1..243: mol_type = other RNA
agcaaggcccccatcaccttcggcgacctggccatctacttcagccaggaggagtgggagtggctgagccccatccagaaggacctgtacgaggacgtgatgctggagaactacaggaacctggtgagcctgggcctgagcttcaggaggcccaacgtgatcaccctgctggagaagggcaaggccccctggatgatcgagcccgtgaggaggaggagggcccccgagctgaccgaggccagc

SEQ ID NO: 19827 - RNA, 243 nt, synthetic construct
  source 1..243: mol_type = other RNA
caggccgaggtgaccttcgaggacgtggccgtgctgttcagcagggaggagtggggcaggctgggccccgcccagaggggcctgtacagggacgtgatgctggagacctacaggaacctggccagcctgggcgccggcagggccggcagcaagcccggcgtgatcacccagctggagaggggcgacgagccctgggtgctggacgcccagggcgccaagggcaagggccagcccagggtgagc

SEQ ID NO: 19828 - RNA, 243 nt, synthetic construct
  source 1..243: mol_type = other RNA
gtgcacggcagcgtgaccttcagggacgtggccatcgacttcagccaggaggagtgggagtgcctgcagcccgaccagaggaccctgtacagggacgtgatgctggagaactacagccacctgatcagcctgggcagcagcatcagcaagcccgacgtgatcaccctgctggagcaggagcaggagccctggatggtggtgaggaaggagaccaacaggtggtaccccgacctggagagcaag

SEQ ID NO: 19829 - RNA, 243 nt, synthetic construct
  source 1..243: mol_type = other RNA
ctgcaggaggccgtgaccttcaaggacgtggccgtggtgttcagcgaggaggagctgggcctgctggacagcgcccagaggaccctgtacagggacgtgatgctggagaccttccagaacctggtgagcctgggccaccagcccttcaagcccgacgtgatcagccagctggagagggaggagatgctgtggatgaagggcctgcagaccggcaggggcaggtgcagcggcggcaggaaccag

SEQ ID NO: 19830 - RNA, 243 nt, synthetic construct
  source 1..243: mol_type = other RNA
tgcaaggagagcgtgatcttcaaggacgtgtgcgtgaacttcagcctggaggagtgggagtgcctggacctgacccagaggaacctgtacaggtgcgtgatgctggagaactacagcaacctggtgagcgtgggcctgagcatccccaagcccgacgtgatcagcctgctggagcagggcaaggagccctggggcgtgttcgacagcgagatgaccaggggcctgaaccaggactgcggcagc

SEQ ID NO: 19831 - RNA, 243 nt, synthetic construct
  source 1..243: mol_type = other RNA
aagcccggcgtgctgaccttcgccgacgtggccgtgtacttcagcagcgaggagtggggctgcctgaggcccgcccagagggccctgtacagggacgtgatgagggagacctacggccacctgggcgccctgggcttccccggccccaagcccgccctgatcagctggatggagcaggagagcgaggagagcgaggcctggagccccgccgccaaggaccccgaggagggcgagagcctgggc

SEQ ID NO: 19832 - RNA, 243 nt, synthetic construct
  source 1..243: mol_type = other RNA
ggccccctgaccttcagggacgtggccatcgagttcagccaggaggagtggaagagcctggaccccgtgcagaaggccctgtactgggacgtgatgctggagaactacaggaacctggtgttcctgggcatcctgcccaagtgcatgaccaaggagctgccccccatcggcaacagcaacaccggcgagaagttccagagggtgatgctggagaggcacgagtgctacgacatcgagaacttc

SEQ ID NO: 19833 - RNA, 243 nt, synthetic construct
  source 1..243: mol_type = other RNA
agccccggcctgctgaccttcagggacgtggtgatcgagttcagcctggaggagtggcagtgcctggaccacgcccagcagaacctgtacagggacgtgatgctggagaactacaggaacctggtgagcctgggcatcgccgtgagcaagcccgacctgatcacctgcctggagcagaacaaggacccctggaacatcaagaggaacgagatggtgaccaagcaccccgtgatgtgcagccac

SEQ ID NO: 19834 - RNA, 243 nt, synthetic construct
  source 1..243: mol_type = other RNA
atgatcgagagccagatcagcttcgaggacgtggccgtggacttcaccctggaggagtggcagctgctgaaccccacccagaagaacctgtacagggacgtgatgctggagaactacagcaacctggccttcctgggctaccagatcatcaagcccgacgccgtgttccagctggagcaggaggagcagtggatcaccgacgaggagatcctgaaccacagctgccccgaggaggtgtggctg

SEQ ID NO: 19835 - RNA, 243 nt, synthetic construct
  source 1..243: mol_type = other RNA
agccagatccccctgaccttccaggacgtggccgtggacttcacctgggaggagtggggcctgctggagcccagccagaaggacatgtactgggacgtgatgctggagatctacgagaacttcatcagcctgggcggcgtgcccctgagcatccccgacgtgatcagccagctggagaggatggaggccccctggatgacccagggcggcgtgctgatcagcaccttcctggacagcagcacc

SEQ ID NO: 19836 - RNA, 243 nt, synthetic construct
  source 1..243: mol_type = other RNA
agccagggcctggtgaccttcagggacgtggccctggacttcagccaggaggagtgggagtggctggaccagagccagaaggacctgtacagggacgtgatgctggagaactacaggaacctggtgtggctgggcctgagcatcagcaagcccaacatgatcagcctgctggagcagggcaaggagccctggatggtggagaaggagatgagcgacggccagtgcgccgactgggacagctgg

SEQ ID NO: 19837 - RNA, 243 nt, synthetic construct
  source 1..243: mol_type = other RNA
aagcccggcgtggtgaggttcgtggacgtggccgtgtacttcagccccgaggagtgggcctgcctgaggcccgcccagagggccctgtacagggacgtgatgagggagacctacggccacctgggcgccctgggcttccccggccccaagcccgccctgatcagctggatggagcaggagaacgaggcctggagccccgccgcccaggaccccgaggagagggagaacctgggcggcgtgccc

SEQ ID NO: 19838 - RNA, 243 nt, synthetic construct
  source 1..243: mol_type = other RNA
ttccagggcagcgtgatgttcagggacgtgagcatcaacttcagccaggaggagtgggagtgcctggaccccggccagatgaacctgtacaaggaggtgatgctggagaacttcagcaacctggtgagcgtgggcctgagcagcgccaagcccgtggtgatcagcctgctggaggagggcaaggagccctggatggtggagagggaggtgaagaggggcctgtgcagcgacctggagagcatg

SEQ ID NO: 19839 - RNA, 243 nt, synthetic construct
  source 1..243: mol_type = other RNA
ctgaaggccagcgtgagcttcaaggacgtggccgtggagctgacccaggaggagtggcagcacatgggccccgcccagaggaccctgtacagggacgtgatgctggagaactacagccacctggtgagcgtgggctactgcatcttcaagcccgaggtgatcttcaagctggagcagggcgagcagccctggttcctggagcaggagttcagcaaccagagctaccccgaggactacaacatc

SEQ ID NO: 19840 - RNA, 243 nt, synthetic construct
  source 1..243: mol_type = other RNA
agcaaggtgcccgtgaccttcggcgacctggccatctacttcagccaggaggagtgggagtggctgcaccccgcccagagggacctgtacaggcacgtgatgctggagaactacggccacctggtgagcctgggcctgaacatcagcaagccctacgtggtgagcctgctggagcagggcagggacccctggctggacaacagggacgtgaggagggacctgttcagcgagagcaagggcgag

SEQ ID NO: 19841 - RNA, 243 nt, synthetic construct
  source 1..243: mol_type = other RNA
ttccaggagagcgtgaccttcgaggacgtggccgtgtacttcagcgagaacgagtggaccggcctggcccccgcccagagggtgctgtacagggacgtgatgctggagaactacggcgccgtggccagcctggccgccttccccttccccaagcccgccctgatcagccagctggagaggggcgaggccccctggtgcaaggccccccagggcgccctggacggcgagggccccaggggcgtg

SEQ ID NO: 19842 - RNA, 243 nt, synthetic construct
  source 1..243: mol_type = other RNA
gcccaggagagcgtgaccttcagggacgtggccgtggtgttcagcagggacgagtggctgtgcctggaccccgcccagaggagcctgtacagggaggtgatgctggagaactacggcaccctggtgagcctgggcatcctgttcagcaagcccaaggtgatcttccagctgcagcagggcgaggacccctggatggtggagagcggcgtgagccagggcccctgcgtgggctgggagagcatg

SEQ ID NO: 19843 - RNA, 243 nt, synthetic construct
  source 1..243: mol_type = other RNA
ccccaggagtgcgtgaccttcaaggacgtggccgtgaacttcacccaggaggagtggcagcagctgaaccccgcccagagggacctgtacagggaggtgatgctggagaactacaggaacctgatcagcctgggcctgcccgtgagcaagcccgacgtgatcttccagctggagcagggcgaggagccctggatgctggacctgcagaggatcgaggagggcgagatcagcaggaacatgtac

SEQ ID NO: 19844 - RNA, 243 nt, synthetic construct
  source 1..243: mol_type = other RNA
ctgcaggagagcgtgaccttcagcgacgtggccgtggacttcaccctggaggagtggggctgcctgtgccccccccagaaggagatgtacagggaggtgatgctggagaactacggcaacctggtgtgcctgggcctggccatgagcaagcccgacgtgatcagcaggctggagaggggcgaggcccccaggagccccggcggcgacctgggcagcgccgactggggcaccgagagcggcgcc

SEQ ID NO: 19845 - RNA, 243 nt, synthetic construct
  source 1..243: mol_type = other RNA
agccaggagcccgtgaccttcgaggacgtggccgtgtacttcacccagaaccagtgggccagcctggaccccatgcagagggccctgtacctggaggtgatgctggagaactacgccaacatcaccagcctggccctgcccttccccaagcccgacctgatcctgcagctggagcagggcgaggccccctggggcctggacccctggacccccctggacggcgaggccctgggcggcgtgcac

SEQ ID NO: 19846 - RNA, 243 nt, synthetic construct
  source 1..243: mol_type = other RNA
acccaggtgagcgtgaccttcgacgacgtggccgtgaccttcacccaggaggagtggaggcagctggaccccgcccagaggaccctgtaccaggaggtgatgctggagaactgcaggctgctggtgagcctgggctgccccgtgcccaggctggagctgatcttccagctggagcagggccagaagctgtggaccgtgaagaaggacctgagcaggagcacctgccccggcaagaggtgcagg

SEQ ID NO: 19847 - RNA, 243 nt, synthetic construct
  source 1..243: mol_type = other RNA
ccccagggccccgtgaccttccaggacgtggccgtggtgttcacccaggaggagtggaggtacctggaccccagccagaaggagctgtacagggacgtgatgctggagaactacaggaacctgctgtacctgggcctggtggtgagcaagcccaacgtgatctacaggttcgagcagggcgaggccagctggaggcccgaccagagggacagcggcagcacctgcagcgacgaggagaccggc

SEQ ID NO: 19848 - RNA, 243 nt, synthetic construct
  source 1..243: mol_type = other RNA
atggagcccgtgaccttcgaggacgtggccgtgtacttcacccagaaccagtgggccagcctggaccccgtgcagagggccctgtacagggaggtgatgctggagaactacgccaacgtggccagcctggccttccccttccccaagcccgtgctgatcagccagctggagcagggcgaggccccctggggccccgaccccggcgaggccgaggtgctgaagggcatctggcccggcggcgag

SEQ ID NO: 19849 - RNA, 243 nt, synthetic construct
  source 1..243: mol_type = other RNA
ttcgaggagctggtgaccttcgaggacgtgttcgtggacttcagccccgaggagctgagcagcctgagcgccgcccagaggaacctgtacagggaggtgatgctggagaactacaggaacctggtgagcctgggctaccagttcagcaagcccgacatcatcagcaggctggaggccgaggagagcagggccatggagaaggacagcaggcacaccgtgatctgccagggcgaggcccacgac

SEQ ID NO: 19850 - RNA, 243 nt, synthetic construct
  source 1..243: mol_type = other RNA
ccccaggacctgatgaccttcgacgacgtggccgtggagttcacccagtgggagtggggccagctgaaccccgcccagaaggacctgtacagggaggtgatgctggagaacttcaggaacctgaccctgctgggcctgctggtgagcaagccctacatgatctgccagctggaggagggcggcgagcccttcatggtgaacaccgagatcagcgtgggcgcccacagcgactgggagaggagg

SEQ ID NO: 19851 - RNA, 243 nt, synthetic construct
  source 1..243: mol_type = other RNA
caggccgaggtgaccttcgaggacgtggccgtgctgctgagcagggaggagtggggcaggctgggccccgtgcagaagggcctgtacagggacgtgatgctggagacctacaggaacctggtgagcctgggcgccggccccgccggccccaagcccgaggtgatcacccagctggagaggggcgacgagccctgggtgcccgacgtgcagggcagggagcagcccaccatcgacggcagcgcc

SEQ ID NO: 19852 - RNA, 243 nt, synthetic construct
  source 1..243: mol_type = other RNA
agccaggagcccgtgaccttcgaggacgtggccgtgtacttcacccagaaccagtgggccagcctggaccccatgcagagggccctgtacctggaggtgatgctggagaactacgccaacatcaccagcctggccctgcccttccccaagcccgacctgatcctgcagctggagcagggcggcgccccctggggcctggacccctggacccccctggagggcgaggccctgggcggcgtgcac

SEQ ID NO: 19853 - RNA, 243 nt, synthetic construct
  source 1..243: mol_type = other RNA
accagcgcccccgtgaccttcggcgacctggccatctacttcagccaggaggagtgggagtggctgagccccgtgcagaaggccctgtacgaggacgtgatgctggagaactaccagaccctggccagcctgggcctgagcttcaggaggcccaacgtgatcaccctgctggagaagggcaaggccccctggatggtggagcccgtgaggaggaggaggggcctggacagcggcagcaagtgc

SEQ ID NO: 19854 - RNA, 243 nt, synthetic construct
  source 1..243: mol_type = other RNA
aggcaggagcccgtgaccttcgaggacgtggccgtgtacttcacccagaacgagtgggtgatcctggaccccgcccagagggccctgtacagggaggtgatgctggagaactacgccaacgtggccagcctggccttcagcttcaccaggcccgtgctggtgagccagctggagaggggcgagctgccccccggcctggacccctgggagagggccagccccgaggccctgaggggcatctgc

SEQ ID NO: 19855 - RNA, 243 nt, synthetic construct
  source 1..243: mol_type = other RNA
agccagggcagcgtgaccttcggcgacgtggccatcgacttcagcagggaggagtgggagtggctgcagcccgcccagagggacctgtacaggatcgtgatgctggagaactacggccacctggtgagcctgggcctgaacgtgagcaagcccgacgtggtgagcctgctggagcagggcaaggagccctggctgggcaacggcgacgtgaggagggacctgttcagcgtgagcgagagcaac

SEQ ID NO: 19856 - RNA, 243 nt, synthetic construct
  source 1..243: mol_type = other RNA
gcccaggagagcctgaccttcgacgacgtggccgtggagttcacctgggaggagtggcagctgctggcccccgcccagaaggacctgtacagggacgtgatgctggagaactacagcaacctggtgagcgtgggctaccaggccagcaagcccgacgccctgagcaagctggtgcagggcgagcccccctggaccatggaggacgagatccactgcaggacccacagcgagatctgggaggtg

SEQ ID NO: 19857 - RNA, 243 nt, synthetic construct
  source 1..243: mol_type = other RNA
cagccccaggaggccgtgaccttcaaggacgtggaggtgaccttcagccaggacgagtggggctggctggacgccagccagaggaacctgtacagggacgtgatgctggagaactacggcaacgtggccagcctggtgggccccttcaccaagcccgccctgatcagctggctggaggccagggagccctggggcctgaacgtgcagggcgcccaccccaagggcagccccagcgccgccccc

SEQ ID NO: 19858 - RNA, 243 nt, synthetic construct
  source 1..243: mol_type = other RNA
gagatggacagcgtgaccttcgaggacgtggccgtgaacttcaccagcgaggagtgggccctgctggaccccagccagaagaagctgtacagggccgtgatgagggagaccttcaggaacctggccagcatcggcctgaacctgggcaagaagtgggaggaccacaacatcgaggacaggtacaagacccacggcaagaagctgaggagccacatggtggagaagctgcacgagagcaaggag

SEQ ID NO: 19859 - RNA, 243 nt, synthetic construct
  source 1..243: mol_type = other RNA
ctgaggggcctggtgaccttcgaggacgtggccgtggagttcacccaggaggagtgggccctgctggaccccgcccagaggaccctgtacagggacgtgatgctggagaactgcaggaacctggccagcctgggctgcagggtgaacaagcccagcctgatcagccagctggagcaggacaagaaggtgatcaccgaggagaggggcatcctgcccagcacctgccccgacctggagaccctg

SEQ ID NO: 19860 - RNA, 243 nt, synthetic construct
  source 1..243: mol_type = other RNA
atggacagcgtgaccatcgaggacgtggccgtggacttcaccctggaggagtgggccctgctgggccccagccagaggaagctgtacagggacgtgatgcaggagaccctgaggaacctggccgccgtgggcgccaagagggagtaccacgccatcgaggaccagtacaagaaccagggcaggaagctgaggaccttcatggtggagaggttctgcaagagcaaggacatcagcctgtgcggc

SEQ ID NO: 19861 - RNA, 243 nt, synthetic construct
  source 1..243: mol_type = other RNA
gccctggagagcgtgaccttccaggacgtggccgtgaacttcacccacgaggagtggggccacctgaagcccgcccagaaggacctgtacagggaggtgatgatggagaactaccagaacttcgtgagcctgggcctgcccttcagcaagccccacgtgatcagccagctggagaagggcgaggccccctggatcaccgagaaggccagcctggtgcccagggtgagctgccaggacttcttc

SEQ ID NO: 19862 - RNA, 243 nt, synthetic construct
  source 1..243: mol_type = other RNA
ccccaggagagcgtgaccttcaaggacatcgccgtggacttcacccaggaggagtgggccctgctggacaccagccagaggaagctgtacagggacgtgatgctggagaacatcagccacctggtgagcgtgggctaccacctgtgcaagagcgacgtgatcagccagctggagcagggcgtggagctgtggagggagggcaggggcttcccccagggccccaaccccgacaggaagagcggc

SEQ ID NO: 19863 - RNA, 243 nt, synthetic construct
  source 1..243: mol_type = other RNA
gagagcgtggccttcgaggacgtggccgtgtacttcacccagaaccagtgggccagcctggaccccgcccagagggccctgtacagggaggtgatgctggagaactacgccaacgtggccagcctggtggccttccccttccccaagcccgccctgatcagccacctggagaagggcgaggccccctggggccccgacccctgggacgccgagatccccagcagcctgagccagggcgacgag

SEQ ID NO: 19864 - RNA, 243 nt, synthetic construct
  source 1..243: mol_type = other RNA
ttccaggagagcgtgaccttcagggacgtggccgtggacttcacccaggaggagtggaggcacctggagcccgcccagagggccctgtacagggacgtgatgctggagaactacgagaacctggtgagcgtgggcatccccgtgagcaggctggacgtgaccagcctgctggagaggcaggaggccgtgtggaaggacggcggcctgagggacagctgcctggacagcctgagcaacaagatc

SEQ ID NO: 19865 - RNA, 243 nt, synthetic construct
  source 1..243: mol_type = other RNA
agccaggagctggtgaccttcgaggacgtggccatctacttcaccgaggaggagtggggcctgctggaccccgcccagaggaagctgtacagggacgtgatgctggagaacttcggcaacgtgctgctgctgggcttccccgtgagcaagcccgacatcatcagcaagctggagaggggcgagatcccctgcgtgcccttcctgcccaggaagaagatcctggtgatcaggctgggcggcggc

SEQ ID NO: 19866 - RNA, 243 nt, synthetic construct
  source 1..243: mol_type = other RNA
agccaggaggtggtgaccttccaggacgtggccgtgaacttcaccagggaggagtggaggctgctgagccccccccagaaggagctgtacagggaggtgatgctggagaacgccaggaacctgctgagcgtgggcctgcccgccagcatcgaggacgtgatcagcaacgtggagcagagggaggccctgtggatgctggagagggagggcctgaggagctgctgccccgaggaggacatcagg

SEQ ID NO: 19867 - RNA, 243 nt, synthetic construct
  source 1..243: mol_type = other RNA
gcccaggagttcgtgatgttcagggacgtggccgtgttcttcagccaggaggagtggggccacctggaccccgcccagagggccctgtacagggaggtgatgctggagaactacagcaacctggtgagcctgggcatcaggttcagcaagcccaaggtgatcagccagctgcagcagggcgaggacccctggatggtggacaggggcgtgccccagggcgcctgccagggctggaagagcctg

SEQ ID NO: 19868 - RNA, 243 nt, synthetic construct
  source 1..243: mol_type = other RNA
ttccagggcagcgtgatgttcagcgacgtgagcatcgacttcagccaggaggagtgggagtacctggacctggagcagagggccctgtacagggacgtgatgctggagaactacagcaacctggtgagcctgggctgcttcatcagcaagcccgacgtgatcagcctgctggagcagggcaaggagccctggaaggtggtgaggaagggcaagaggaggtaccccgacctggagaccaggtac

SEQ ID NO: 19869 - RNA, 243 nt, synthetic construct
  source 1..243: mol_type = other RNA
caggccgagctgaccttcgaggacgtggccgtgttcctgagccaggaggagtggggcaggctggaccccgcccagaggggcctgtacagggacgtgatgctggagacctacaggaacctggtgagcctgggcgccggccccgccggccccaagcccggcgtgatcacccagctggagaggggcgacgagccctgggtgctggacacccagggcgtggagggcagggagaggcagaaggtggac

SEQ ID NO: 19870 - RNA, 243 nt, synthetic construct
  source 1..243: mol_type = other RNA
gtgcaggagcccgtgaccttcaaggacgtggccgtggacttcacccaggaggagtggggccagctggacctggtgcagaggaccctgtacagggacgtgatgctggagacctacggccacctgctgagcgtgggcaaccagatcgccaagcccgaggtgatcagcctgctggagcagggcgaggagccctggagcgtggagcagacctgcccccagaggagctgccccgagtggatgaggaac

SEQ ID NO: 19871 - RNA, 243 nt, synthetic construct
  source 1..243: mol_type = other RNA
ttcgaggagctggtgaccttcgaggacgtgttcgtggacttcagccccgaggagctgagcagcctgagcgccccccagaggaacctgtacagggaggtgatgctggagaactacaggaacctggtgttcctgggctaccagttcagcaagcccgacatcatcagcaggctggaggtggaggagagccacgccatggagaccgacagcaggcacaccgtgatctgccagggcgaggcccacgac

SEQ ID NO: 19872 - RNA, 243 nt, synthetic construct
  source 1..243: mol_type = other RNA
ttccagggcagcctgagcatcgaggacgtgaccgtgggcttcacccaggaggagtggcagcacctggaccccgcccagaggaccctgtacagggacgtgatgctggagaactacagccacctggtgagcgtgggctactgcatccccaagcccgaggtgatcttcaagctggagaggggcgagcagctgtggatcctggaggaggagagcagcagccagagccaccccgaggtgtgcaaggtg

SEQ ID NO: 19873 - RNA, 243 nt, synthetic construct
  source 1..243: mol_type = other RNA
acccagggcctggtgaccttcagggacgtggccatcgagttcagccaggaggagtggaagtgcctggagcccgcccagaaggacctgtacaaggacgtgaccctggagaacttcagcaacctggtgagcctgggcctgagcctgcccaagcccgacgtgatcagcctgctggagcagggcaaggagccctggatggtgatcaacgacatgaccggcccctggtgccccgacctggagagcagg

SEQ ID NO: 19874 - RNA, 243 nt, synthetic construct
  source 1..243: mol_type = other RNA
agccagggcctggtgaccttcgaggacgtggccgtgtacttcagcctggaggagtgggagaggctggacgccgcccagagggacctgtacaaggaggtgatgcaggagaactacggcatcctggtgagcctgggctaccccatccccaagcccgacctgatcttcaggctggagcagggcgaggagccctgggtgcccgacagccccaggcccgaggagggcgacatcgtgaccggcgtgtac

SEQ ID NO: 19875 - RNA, 243 nt, synthetic construct
  source 1..243: mol_type = other RNA
gcccaccacctggtgatgttcagggacgtggccgtggacttcagccaggacgagtgggagtgcctgaacagctaccagaggaacctgtacagggacgtgatcctggagaactacagcaacctggtgagcgtggccggctgcagcatcagcaagcccgacgtgatcaccctgctggagcagggcagggagccctggatggtggtgagggacgagaggaggaggaggaccctggacctggagagc

SEQ ID NO: 19876 - RNA, 243 nt, synthetic construct
  source 1..243: mol_type = other RNA
gcccaccacctggtgatgttcagggacgtggccgtggacttcagcaaggaggagtgggagtgcctgaacagctaccagaggaacctgtacagggacgtgatcctggagaactacagcaacctggtgagcgtgggctgcagcatcagcaagcccgacgtgatcaccctgctggagcagggcaaggagccctggatggtggtgagggacgagaggaggaggaggagcctggacctggagagcagg

SEQ ID NO: 19877 - RNA, 243 nt, synthetic construct
  source 1..243: mol_type = other RNA
ctgcaggaggccgtgaccttcaaggacgtggccgtggtgttcaccgaggaggagctgggcctgctggacagcacccagaggaccctgtacagggacgtgatgctggagaacttcaggaacctggtgagcctgggccaccagagcttcaagcccgacgtgatcagccagctggagagggaggagaagctgtggctgaagaagctgcagacccagaggggcaggaggagcggcggcaggagccag

SEQ ID NO: 19878 - RNA, 243 nt, synthetic construct
  source 1..243: mol_type = other RNA
ccccacaggctggtgctgttcagggacgtggccgtggacttcagccaggaggagtgggcctgcctggacagcgagcagaaggacctgtacagggacgtgatgctggagaactacagcaacctggtgagcctgggcttcagcagcagcaaggccgacatgctgagcctgctggagcagggcaaggagccctggaaggtggtgcaggacgtggccaggagccagagcagcgacctgggcagcagg

SEQ ID NO: 19879 - RNA, 243 nt, synthetic construct
  source 1..243: mol_type = other RNA
ccccagaagagcgtgaccttcgaggacgtggccgtgtacttcacccagaccgagtgggacggcctgagccccgcccagagggccctgtacagggacgtgatgctggagaactacggcaacgtggccagcctgggcttcagcctgctgaagcccgccgtgatcctgcagctggagggcgccggcgagctgggcgaccccagcctgctggtggccggcaccgaggtgggcagccagggcgtgtgg

SEQ ID NO: 19880 - RNA, 243 nt, synthetic construct
  source 1..243: mol_type = other RNA
gtgcccgccctggtgaccttcagggacgtggccgtggacttcacccaggaggagtggaggcacctggagcccgcccagagggccctgcacagggacgtgatgctggagaacttccagaacctggtgagcgtgggcctgcccgtgagcaaggtggacgtgatcagcctgctggagaggggcgaggccccctggcagcccgagggcggcggcccccccgacccctgctacgactacctgaactgg

SEQ ID NO: 19881 - RNA, 243 nt, synthetic construct
  source 1..243: mol_type = other RNA
atggccttcaaggacgtggccgtggccttcacccagaaggagtggaagctgctgagccccgcccagaggaccctgtacagggacgtgatgctggagaactacagccacatggtgagcctgggcatcgccttccccaagcccaagctgatcatccagctggagcagggcgacgagccctggagggaggagagcgagagcctgctggacctgtgccccgagcccaggaccgagttccagccccac

SEQ ID NO: 19882 - RNA, 243 nt, synthetic construct
  source 1..243: mol_type = other RNA
gcccacggcagcgtgatgttcagcgacgtgagcatcgacttcagccaggaggagtgggactacctggacctggagcagagggacctgtacagggacgtgatgctggagaactacagcaacctggtgagcctgggctgcttcgtgagcaagcccgacgtgatcttcctgctggagcagggcaaggagccctggaaggtggtgaggaagggcaggaggaggtaccccgacctggagaccaactac

SEQ ID NO: 19883 - RNA, 243 nt, synthetic construct
  source 1..243: mol_type = other RNA
ccccagggcagcgtgaccttcgaggacgtggccgtggacttcagccaggaggagtgggagctgctggaccccgcccagaggaccctgtacagggaggtgatgctggagacctgcaggaacctggtgagcctgggctgcagcctgtgccagcccgtggcccccccccacctggagcagggcgaggccgtgtggatggtggacaggggcatcccccaggccttctgcagcgactgggagaccagg

SEQ ID NO: 19884 - RNA, 243 nt, synthetic construct
  source 1..243: mol_type = other RNA
ttccaccagctggtgaccttcgaggacgtggccgtgtacctgagcaaggaggagtggaagaggctgaacctggcccagagggagctgtacagggacgtgatgctggagaactacgagaacctgctgagcctgggcttccccgtgagcaagcccgacatcatcagccagctggagcagaggaaggaggcctggatcgtgcagggccccgagaagaggaagttcagccagaacgcccacagggac

SEQ ID NO: 19885 - RNA, 243 nt, synthetic construct
  source 1..243: mol_type = other RNA
ctgctgaccttcgaggacgtggccatcagcttcagcgaggaggagtggaagctgatggaccccgcccagaagatgctgtacagcgacgtgatgcaggagaactacgagaccgtgatcagcctgggcctgaagctgaagaaggacaccggcaacgaccagcccatcagcaccagcaccctggagatccaggccagcggctgcaaggtgctgaggaaggccaggatgaaggtggcccagaagacc

SEQ ID NO: 19886 - RNA, 243 nt, synthetic construct
  source 1..243: mol_type = other RNA
caggccgccgtgaccttcgaggacgtggccgtgctgctgagcagggaggagtggtgcaggctggcccccgcccagagggacctgtacagggacgtgatgctggagacctacaggaacctgatcagcctgggcaccggcctgaccggccccaagcccggcgtgatcagccagctggagaggggccacgagccctgggtgctggacgtgcagagcaccaagggcagggtggacggcagcgactgc

SEQ ID NO: 19887 - RNA, 243 nt, synthetic construct
  source 1..243: mol_type = other RNA
ctgcaggtgagcgtgagcttcgaggacgtggccgtggacttcagcagggaggagtggcagcagctggacagcacccagaggaggctgtaccaggacgtgatgctggagaactacagccacctgctgagcctgggctgcgagatccccaagcccgaggtgatcttcaagctggagcagggcgaggagccctggaccctggaggaggagaccccccaccagagctgcagcgacgagaagttcggc

SEQ ID NO: 19888 - RNA, 243 nt, synthetic construct
  source 1..243: mol_type = other RNA
ttccaggagagcgtgaccttcgaggacgtggccgtgtacttcacccagagccagtgggccagcctgggccccctgcagagggccctgtacagggaggtgatgctggagaactacgccaacgtggccagcctggccttccccttccccaagcccgtgctgatcagccagctggagagggaggaggcccccctgggccccgacccctgggagaccgaggtgctgagggacatctgccccggcggc

SEQ ID NO: 19889 - RNA, 243 nt, synthetic construct
  source 1..243: mol_type = other RNA
acccaggtgagcctgaccttcgacgacgtggccgtgaagctgacctgggaggagtggcagctgctggaccccgcccagaaggacctgtacagggacgtgatgctggagaactacagcaacctggtgagcgtgggctaccaggtgagcaagcccgacgccctgagcaggctggagaggggcgagcccccctggagcatcgaggacaagatccacaccaggaccttcagcggcgagaggccctac

SEQ ID NO: 19890 - RNA, 243 nt, synthetic construct
  source 1..243: mol_type = other RNA
atgatgaccttcagggacgtggccatcgacttcagccaggaggagtggaagtggctgcagcccgcccagagggacctgtacaggtgcgtgatgctggagaactacggccacctggtgagcctgggcctgagcatcagcaagcccgacgtggtgagcctgctggagcagggcaaggagccctggctgggcaagaagggcatcagcgagagcagcggcgagatcaaggacttcagccccaagaac

SEQ ID NO: 19891 - RNA, 243 nt, synthetic construct
  source 1..243: mol_type = other RNA
gagctggtgaccttcagggacgtggtgatcagcttcagccaggaggagtgggagtacctggacagcgcccagagggacctgtactgggacgtgatgatggagaactacagcaacctggtgagcctggacctggagagcaagtacgacaagaagaccctgagcaccgagaaggacatcatcgagaagaacgacagccagtgggaggtgatcgagagcagcaagctggtgggcctggccaacagc

SEQ ID NO: 19892 - RNA, 243 nt, synthetic construct
  source 1..243: mol_type = other RNA
aagcccgaggacgtgagcttcgccgaggtggccgtgtacttcagcctggacgagtggggctacctgtggcccgcccagagggccctgtacagggacgtgatgagggagacctacggccacttcggcgagctgggcttccccggccccaagcccgccctgatcagctggatggagcaggagagcgaggcctggagccccgccgcccaggaccccgaggagggcgagagcgtgggcggcgccgtg

SEQ ID NO: 19893 - RNA, 243 nt, synthetic construct
  source 1..243: mol_type = other RNA
agccagagcctggtgaccttcggcgacgtggccgtggacttcagccaggaggagtgggagaggctgagcagcgaccagagggacctgtacaggagggtgatgctggagaactacaggaacctggtgagcctgggcctgtgcttcagcaagcccgacatcatcagcagcctggagcagaggaaggagctgtggatggccaagagggaggtgaccaggggccagtgccccgactggaaggccgtg

SEQ ID NO: 19894 - RNA, 243 nt, synthetic construct
  source 1..243: mol_type = other RNA
aagacccaggtgagcctggagttcaacgacgtggccgtggagttcgcctgggaggagtggcagctgctggaccccgcccagaaggacctgtacagggaggtgatgctggagaacttccacaacctggtgagcgtgggctgccaggtgggcaagcccgacgtgctgttcaggctggagagggagcccccctggagcctggaggacgagatccacagccagaacttcagcgagatccaggaggtg

SEQ ID NO: 19895 - RNA, 243 nt, synthetic construct
  source 1..243: mol_type = other RNA
caccaggacctggtgaccttcaaggacgtggccgtggacttcacccccgaggagtggggccagctggtgcccagccagaaggagctgtacagggacgtgatgctggagaactaccagaacctggtgtggctgggcctggccgtgagcaagcccgacgtgatctaccagctggagcaggtgggcggcacctgggtgcccgagggcgagaccctgaccgtgagctgcagcgacttcgtgaccagg

SEQ ID NO: 19896 - RNA, 243 nt, synthetic construct
  source 1..243: mol_type = other RNA
gcccaggaggtggtgagcttcaaggacgtggccgtggacttcaccagggaggagtggaggctgctgagccccccccagaaggagctgtacaaggaggtgatgctggagaacgccaggaacctgctgagcgtgggcctgagcgccccccccgaggacatgttcagcagcctggagcagagggaggccccctggatgctggagaaggacgacctgaggagctgctgccccgagggcaagatgagg

SEQ ID NO: 19897 - RNA, 243 nt, synthetic construct
  source 1..243: mol_type = other RNA
cagccccaggaggccgtgaccttcaaggacgtggaggtgaccttcagccaggacgagtggggctggctggacgccagccagaggaacctgtacagggacgtgatgctggagaactacggcaacgtgaccagcctggtgggccccttcaccaagcccgccctgatcagctggctggaggccagggagccctggggcctgaacgtgcagggcgcccaccccaagaggagccccagcgccgccccc

SEQ ID NO: 19898 - RNA, 243 nt, synthetic construct
  source 1..243: mol_type = other RNA
gccatcaggagcgtgatgttcagcgacatcagcatcgacttcagccccgaggagtgggagtacctggacctggagcagaaggacctgtacagggacgtgatgctggagaactacagcaacctggtgagcctgggctgcttcatcagcaagcccgacgtgatcagcctgctggagcagggcaaggagccctggaaggtggtgaggaagaggaggaggcagtaccccgagatgctgctgctgctg

SEQ ID NO: 19899 - RNA, 243 nt, synthetic construct
  source 1..243: mol_type = other RNA
ccccagggctgcgccatcagcgaggacgtgttcgtgtacttcagcagggaggagtgggtgctgctggacgaggaccagaggctgctgtacagggacgtgatgctggagaacttcgccctgctggccagcctgggcatcaccagcagcaggagctacctggtgacccagctggagcagggcgaggagccctggatgcccgcccaggtggacatgaccgccgccaccgagaaggaggcccagaag

SEQ ID NO: 19900 - RNA, 243 nt, synthetic construct
  source 1..243: mol_type = other RNA
ccccaggacctggtgaccttcaaggacgtggccatcgacttcagccaggaggagtgggagtggctgaaccccgcccagaggagcctgtacaggagcatgatgctggagaactaccagagcctggtgagcgtgggcctgtgcgtgagcaagccctacgtgatcagcctgctggagcagggcaaggagccctgggagatgaagagcgagatgaggaggacccccttccccgactgggagagcgtg

SEQ ID NO: 19901 - RNA, 243 nt, synthetic construct
  source 1..243: mol_type = other RNA
acccaggagagcgtgaccttcagggacgtggccgtgcacttcagcagggacgagtggctgtacctggaccccgcccagagggccctgtacagggaggtgatgctggagaactacagcagcctggtgagcctgggcatcctgttcagcaagcccaaggtgatcttccagctgcagcagggcgaggacccctggatggtggagaacggcgtgagctgcggcgcctgcctgggctgggagagcctg

SEQ ID NO: 19902 - RNA, 243 nt, synthetic construct
  source 1..243: mol_type = other RNA
gagcccggcgccgtgaccttcggcgacgtggccgtgtacttcagcagggaggagtggggctgcctgaggcccgcccagagggccctgtacagggacgtgaccagggagacctacagccacctgggcgccctgggcgtgggcggcagcaagcccgccctgatcagctggatggaggaggaggccgagctgtggggccccgccgcccaggaccccgaggtggccaagtgccccaccgaggccgac

SEQ ID NO: 19903 - RNA, 243 nt, synthetic construct
  source 1..243: mol_type = other RNA
agccaggagcccgtgaccttcgccgacgtggccgtggtgttcacccccgaggagtgggtgttcctggacagcacccagaggagcctgtacagggacgtgatgctggagaactacaggaacctggccagcgtggccggcgaccagctgtgcaagcccaacgccctgagctacctggagcagaggggcgagcagtggaccaccgagaggggcgtgatcagcgacacctgccccgagccccagctg

SEQ ID NO: 19904 - RNA, 243 nt, synthetic construct
  source 1..243: mol_type = other RNA
ttccagggcagcgtgaccttcagggacgtggccatcgacttcagccaggaggagtgggagtggctgcagcccgcccagagggacctgtacaggcacgtgatgctggagaactacggccacctggtgagcctggccggcttcaacatcagcaagccctacgtggtgagcctgctggagcagggcagggagccctggctggtgaagggcgacgtgaggagggaccccttcagcgagagcaacggc

SEQ ID NO: 19905 - RNA, 243 nt, synthetic construct
  source 1..243: mol_type = other RNA
gcccaggaggtggtgaccttcaaggacgtggccgtggacttcaccagggaggagtggtgcctgctgagccccccccagaaggagctgtacaaggaggtgatgctggagaacgcccagaacctgctgagcgtgggcctgcccggcccccccgaggacgtgatcagctacctgaagcagaggaaggacccctggatgctggagcaggagggcctgaggagctgctgccccgagggcgagatcagg

SEQ ID NO: 19906 - RNA, 243 nt, synthetic construct
  source 1..243: mol_type = other RNA
gtgcaggtgcccatcaagttcgaggacgtggccgtgtacttcagcgagcccgagtggaagaacctggaccagtggcagaaggagctgtacaagcacgtgatgaccgccaactacgagatcctgttcagcctggacagcgccatccccaagcccgacctgatcagccacatcgagaggggcgaggagcccttcctgagggaccacggcaacctgatgaagagggacaagaccatcggctacggc

SEQ ID NO: 19907 - RNA, 243 nt, synthetic construct
  source 1..243: mol_type = other RNA
agccagggccccgtgaagttcgaggacgtggccatctacctgtggaaggaggagtgggagctgatggacagcacccagaagaggctgtacaggcaggtgatgctggagacctacgagaacgtgctgagcgtgggcaccccccacgacaagcccgccatgatcgtgcacctggagcagggcgagaccgcctggagccccgccctgcagaggcccggcaaggagaagggcaggctgcacggccac

SEQ ID NO: 19908 - RNA, 243 nt, synthetic construct
  source 1..243: mol_type = other RNA
agccagaaggccctgaccttccaggacgtggccgtggagttcacccaggaggagtggggcctgctggagcccgcccagaagaacatgcacagggacgtgatgctggagaactacgagaacttcgtgagcctgggcctgcccgtgcccaagagcgccctgatcttccacctggagaggagggagaccccctggctgcccagcggcgaggtgctgaggaacacctaccccgactacctggtgcag

SEQ ID NO: 19909 - RNA, 243 nt, synthetic construct
  source 1..243: mol_type = other RNA
agccaggagagcgtggccttcgaggacgtggccgtgtacttcaccaccaaggagtgggccatcatggtgcccgccgagagggccctgtacagggacgtgatgctggagaactacgaggccgtggccttcgtggtgccccccaccagcaagcccgccctggtgagccacctggagcagggcaaggagagctgcttcatcaggccccaggtggtgctgagcaggagcgactggagggccggcctg

SEQ ID NO: 19910 - RNA, 243 nt, synthetic construct
  source 1..243: mol_type = other RNA
aggcccagggccctgaagttcgtggacgtggccgtgtacttcagcagcgaggagtggggctgcctgaggcccgcccagagggccctgtacagggacgtgatgagggagacctacggccacctgggcgccctgggcttccccggccccaagcccgccctgatcagctggatggagcaggagagcgaggcctggagcagcgccgcccaggaccccgagaagggcgagaacctgggcggcgccagg

SEQ ID NO: 19911 - RNA, 243 nt, synthetic construct
  source 1..243: mol_type = other RNA
acccaggagagcctgaccctggaggacgtggccgtggagttcagctgggaggagtggcagctgctggacaccgcccagaaggacctgtacagggacgtgatggtggagaactacaaccacctggtgagcctgggctaccagaccagcaagcccgacgccctgagcaagctggcccacggccaggagccctggatgaccgacgccaagatccagaacaagaactgccccggcatcaggaaggtg

SEQ ID NO: 19912 - RNA, 243 nt, synthetic construct
  source 1..243: mol_type = other RNA
tgcgagggcctggtgagcttcgaggacgtgaccatggacttcagcagggaggagtggcagcagctggaccccgcccagaggtgcctgtactgggacgtgatgctggagatctacagccacctgctgagcgtgggctaccacatccccaaccccgagatcatcagcaggatggagaagggcaagaagagctggatcaggggcgcccagctgccccaccagaggcacagggaggtggtgttcggc

SEQ ID NO: 19913 - RNA, 243 nt, synthetic construct
  source 1..243: mol_type = other RNA
agcaagggcagcctgatgttcagggacgtgagcatcgacttcagccaggaggagtgggagtgcctggacagcggccagatgaacctgtacaaggaggtgatgctggagaacttcagcaacctggtgagcgtgggcctgagcagcagcaagcccgccgtgatcagcctgctggagcagggcagggagccctggatggtggacagggagctgaccaggggcctgtgcagcgacctggagagcatg

SEQ ID NO: 19914 - RNA, 243 nt, synthetic construct
  source 1..243: mol_type = other RNA
aaggaggccttcatggccttcggcgacgtggccgtggacttcacccaggaggagtggaggctgctgagccccgcccagaggaccctgcacagggaggtgatgctggagacctacaaccacctggtgagcctggagatccccttcagcaagcccaagctgatcagccagctggagaggggcgaggagccctggatcaaggagaggcagaggcccctgagcctgtgccccgccggcagcaagctg

SEQ ID NO: 19915 - RNA, 243 nt, synthetic construct
  source 1..243: mol_type = other RNA
agccaggagcccgtgaccttcgaggacgtggccgtgtacttcacccagaaccagtgggccagcctggaccccatgcagagggccctgtacctggaggtgatgctggagaactacgccaacatcaccagcctggccgccctgcccttccccaagcccgacctgatcctgcagctggagcagggcgaggccccctggggcctggacccctggacccccctggacggcgaggccctgggcggcgtg

SEQ ID NO: 19916 - RNA, 243 nt, synthetic construct
  source 1..243: mol_type = other RNA
gtgcaggccagcctgagcttcgaggacgtggccgtgcacttcacctgggaggagtggcagctgctggaccccagccagaaggacctgtacaggaacgtgatgtgggagaactactgcaacctggtgagcgtgggctaccagacccccaagcccgacagcttcttccagctggagcagggcgagcccccctggaccgtggagggcgccggccagagccagacctgccccggcaccagggccagc

SEQ ID NO: 19917 - RNA, 243 nt, synthetic construct
  source 1..243: mol_type = other RNA
gtgcaggagcccgtgaccttcaaggacgtggccgtggacttcacccaggaggagtggggccagctggacctggtgcagaggaccctgtacagggacgtgatgctggagacctacggccacctgctgagcgtgggcaaccagatcgccaagcccgaggtgatcagcctgctggagcagggcgaggagccctggagcgtggagcaggcctgcccccagagggcctgccccgagtggatgaggaac

SEQ ID NO: 19918 - RNA, 243 nt, synthetic construct
  source 1..243: mol_type = other RNA
ttccaggccagcgtgagcttccaggacgtgaccgtggagttcagccaggaggagtggcagcacctgggccccgtggagaggaccctgtacagggacgtgatgctggagaactacagccacctggtgagcgtgggctactgcttcaccaagcccgagctgatcttcaccctggagcagggcgaggacccctggctgctggagaaggagaagggcttcctgagcaggaacagccccgaggacagc

SEQ ID NO: 19919 - RNA, 243 nt, synthetic construct
  source 1..243: mol_type = other RNA
ccccagaagagcgtgaccttcgaggacgtggccgtgtacttcacccaggccgagtgggacggcctgagccccgcccagaggaccctgtacagggacgtgatgctggagaactacggcaacgtggccagcctgggcttccccctgctgaagcccgccgtgatcagccagctggagggcggcagcgagctgggcggcagcagccccctggccgccggcaccggcctgcagggcctgcagaccgtg

SEQ ID NO: 19920 - RNA, 243 nt, synthetic construct
  source 1..243: mol_type = other RNA
gcccaccacctggtgatgttcagggacgtggccgtggacttcagccaggaggagtgggagtgcctgaacccctaccagaggaacctgtacagggacgtgatcctggagaactacagcaacctggtgagcgtgggctgcagcatcagcaagcccgacgtgatcaccctgctggagcagggcaaggagccctggatggtggtgagggacgagaggaggaggagcctggacctggagagcaggtac

SEQ ID NO: 19921 - RNA, 243 nt, synthetic construct
  source 1..243: mol_type = other RNA
aagcccggcgccctgagcttcgccgacgtggccgtgtacttcagccccgaggagtggggctgcctgaggcccgcccagagggccctgtacagggacgtgatgagggagacctacggccacctgggcgccctgggcttccccggccccaagcccgccctgatcagctggatggagcaggagagcgaggcctggagcagcgccgcccaggaccccgagaagggcgagagcctgggcggcgccagg

SEQ ID NO: 19922 - RNA, 243 nt, synthetic construct
  source 1..243: mol_type = other RNA
acccaggtgagcgtgaccttcgacgacgtggccgtgaccttcaccagggaggagtggaggcagctggaccccgcccagaggaccctgtaccaggaggtgatgctggagaactgcaggctgctggtgagcctgggctgccccgtgcccaggcccgagctgatcttccagctggagcagggccagaagctgtggaccgtgaaggaggacctgagcaggagcacctgccccggcaagaggtacagg

SEQ ID NO: 19923 - RNA, 243 nt, synthetic construct
  source 1..243: mol_type = other RNA
ggcagcgtgatgttcagcgacgtgagcgtggacttcagccaggacgagtgggagtgcctggaccccgtgcagagggacctgtacagggaggtgatgctggagaactacagcaacctggtgagcgtgggcctgtacatccccaagccccaggtgatcagcctgctggagcagggcaaggagccctggatggtgggcaaggagctgaccaggggcctgtgcagcgacctggagagcatgtgcgag

SEQ ID NO: 19924 - RNA, 243 nt, synthetic construct
  source 1..243: mol_type = other RNA
gagagcgtgaccttcgaggacgtggccgtgtacttcagcgagaacgagtggatcggcctgggccccgcccagagggccctgtacagggacgtgatgctggagaactacggcgccgtggccagcctggccttccccttccccaagcccgccctgatcagccagctggagaggggcgaggccccctggtgcagcgccccccagggcgccctggacggcgagagccccaggggcatcagcagcgag

SEQ ID NO: 19925 - RNA, 243 nt, synthetic construct
  source 1..243: mol_type = other RNA
agctacggcagcctgagcttcgaggacgtgaccgtgggcttcagccaggaggagtggcagcacctggaccccgcccagaggaccctgtacagggacgtgatgctggagaactacagccacctggtggccgtgggctgctgcgtgcccaagcccgacgtgatcttcaggctggagcagggccagcagccctggatcgtggaggaggagagcctggaccagagctgccccgaggtgtgcaaggtg

SEQ ID NO: 19926 - RNA, 243 nt, synthetic construct
  source 1..243: mol_type = other RNA
ttccaggccagcgtggtgttcgaggacgtggccgtgaacttcacccccgaggagtgggccctgctgaacaggggccagaggaagctgtacagggacgtgatgctggagacctgcaggaacctgagcgccgtggagaagcagaagttccacagcagcggcgacctgaccaggatgcaggagggcctgctgaggagccccctggtggagagcgtgtgcgagaggatcgagggcgacccctgcggc

SEQ ID NO: 19927 - RNA, 243 nt, synthetic construct
  source 1..243: mol_type = other RNA
agccaggagcccgtgaccttcgaggacgtggccgtgtacttcacccagaaccagtgggccagcctggaccccacccagagggccctgtacagggaggtgatgctggagaactacgccaacatcaccagcctggccgccttccccttccccaagcccgacctgatcctgcagctggagaggggcgaggccaggtggggcctggacccctggatcgccatcgagggcgaggccctgggcggcgtg

SEQ ID NO: 19928 - RNA, 243 nt, synthetic construct
  source 1..243: mol_type = other RNA
aggcccagggccgtgaagttcgccgacgtggccgtgtacttcagccccgaggagtggggctgcctgaggcccgcccagagggccctgtacagggacgtgatgagggagacctacggccacctgggcgccctgggcttccccggccccaagcccgccctgatcagctggatggagcaggagagcgaggcctggagccccgacgcccaggaccccgaggagggcgagagcctgggcggcgccctg

SEQ ID NO: 19929 - RNA, 243 nt, synthetic construct
  source 1..243: mol_type = other RNA
atgaccttcgaggacgtgaccgtggagttcaccccctgggagtggggccagctggaccccgcccagaaggacctgtacagggaggtgatgctggagaacttcaggaacctggccagcctgggcctgcccgtgagcaagccccacgtgatctgccagctggaggagggcgaggagccctgcgtgctggagagggagatcagcgtgggcgcccagagcgacctgaagaggaggcccaaggccaag

SEQ ID NO: 19930 - RNA, 243 nt, synthetic construct
  source 1..243: mol_type = other RNA
agccagggcagcgtgagcttcaaggacgtgaccgtggacttcacccaggaggagtggcagcagctggaccccgcccagaaggccctgtacagggacgtgatgctggagaactactgccacttcatcgccgtgggcttccacatgaccaagcccgacatgatcaggaagctggagcagggcgaggagctgtggacccagaggatcttccccagctacagctacctggaggaggacggcaagacc

SEQ ID NO: 19931 - RNA, 243 nt, synthetic construct
  source 1..243: mol_type = other RNA
ttccagggcagcgtgaccttccaggacgtggccgtggtgttcacccccgaggagtggggccacctggagcccagccagaaggagctgtacagggaggtgatgctggagaacttcaggaacctggtgtgcctgggcctggtggtgtacaagcccagcgtgatctaccagctggagaggggcggcgccccctggaagcccggcggcggcggcaggaggagcggcagcagcgactgggagaccctg

SEQ ID NO: 19932 - RNA, 243 nt, synthetic construct
  source 1..243: mol_type = other RNA
atggccttcgaggacgtggccgtgcacttcagccaggaggagtggggcctgctggacaccgcccagaggagcctgtacaggagggtgatgctggagaacttcgccctgctggccagcctgggcctgagcgtgagcaggccccacgtggtgacccagctggagaggggcgaggagccctgggtgctgagcggcgtggacgtgaccctgcccagggacgcccagaggaggccccacaggggcagc

SEQ ID NO: 19933 - RNA, 243 nt, synthetic construct
  source 1..243: mol_type = other RNA
aagcccggcaccgtgagcttcgccgacgtggccgtgtacttcagcagggaggagtggggctacctgaggcccgcccagagggccctgtacagggacgtgatgagggagacctactgccacctgggcgccctgggcgtgggcggcagcaagcccgccctgatcagctgggtggaggaggaggccgagctgtgggaccccgccgccagggaccccgaggtgaccaagggcctgaccgagaccgac

SEQ ID NO: 19934 - RNA, 243 nt, synthetic construct
  source 1..243: mol_type = other RNA
gtgcagggcagcgtgaccttcagggacgtggccgtgctgttcagccaggacgagtggctgcacctggacaccgcccagaggaccctgtacagggaggtgatgctggagaactacagcaacctggtgagcctgggcatcctgttcagcaagcccaaggtgatcagccagctggagcagggccaggacccctggaaggtggagcacggcgccccccagggcacctgccccggctgggagagcctg

SEQ ID NO: 19935 - RNA, 243 nt, synthetic construct
  source 1..243: mol_type = other RNA
ccccaggtgctggtgagcttcgaggacgtggccgtgttcctgagcagggaggagtggggctgcctgggccccgcccagaggggcctgtacagggacgtgatgctggagacctacaggaacctgatcagcctgggcttccaggacagcaagcccgacgtgatcagcaagctggaggagggcgaggagccctgggccccctacagccccaggatcgaggagggctggatccagagccacggcagc

SEQ ID NO: 19936 - RNA, 243 nt, synthetic construct
  source 1..243: mol_type = other RNA
ccccaggagcccgtgaccttcgccgacgtggccgtgctgttcacccccgaggagtggctgttcctggacagcgcccagaagagcctgtacagggacgtgatgctggagaactacaggaacctggccagcgtgggcgaccagctgtgcaagaccaagatgagcagccacatggagcagagggaggagctgtgcgtgaccgagaggggcgtgttccccggcgcccacctgggcccccacctgcag

SEQ ID NO: 19937 - RNA, 243 nt, synthetic construct
  source 1..243: mol_type = other RNA
aagcccctggccgtgaggttcgccgacgtggccgtgtacttcagccccgaggagtggggctgcctgctgcccgcccagagggccctgtacagggacgtgatgagggagacctacggccacctgggcgccctgggcttccccggccccaagcccgccctgatcagctggatggagcaggagagcgaggcctggagccccgacgcccaggaccccgaggagggcgagagcctgggcggcgccctg

SEQ ID NO: 19938 - RNA, 243 nt, synthetic construct
  source 1..243: mol_type = other RNA
gcccaggcccccctgagcttcgaggacgtggccgtgagcttcagcagggaggagtggaggctgctggtgcccgcccagaaggacctgtacagggacgtgatgctggagaactacaggaacctggtgagcgtgggctaccaggccagcgagcccgacagcctgttccagctggagcacggcggccccctgtgggccgtggagggcgccgcccccaggcccccctgccccggcttcgtgctgcag

SEQ ID NO: 19939 - RNA, 243 nt, synthetic construct
  source 1..243: mol_type = other RNA
ccccaggagagcgtggccttcgacgacgtggccgtgtacttcaccaagaaggagtgggccatcatggtgcccgaccagagggccctgtacagggacgtgatgctggagaactacgaggccgtggccttcgtggtgccccccaccagcaagcccgccctggtgagccacctggagcagggcaaggagccctgcttcacccagccccagggcgtgctgagcaggagcaactggagggccggcttc

SEQ ID NO: 19940 - RNA, 243 nt, synthetic construct
  source 1..243: mol_type = other RNA
aggaccagcgccttccccttccaggcccccgtgaccttcggcgacctggccatctacttcagccaggaggagtgggagtggctgagccccatccagaaggacctgtacgaggacgtgatgctggagaactaccagaacctggtgagcctgggcctgtgcttcaggaggcccaacgtgatcaccctgctggagaagggcaaggccccctggatggtggaccccgtgaagaggaggaggggcctg

SEQ ID NO: 19941 - RNA, 243 nt, synthetic construct
  source 1..243: mol_type = other RNA
agcgagggcctggtgaccttcggcgacgtggccgtggacttcagccaggaggagtgggagtggctgaaccccgcccagaggagcctgtacaggaaggtgatgctggacaactacaggagcctggtgagcctgggcgtgagcgtgagcaagcccgacgtgatcagcctgctggagcagggcaaggagccctggctggtgaaggaggagggccccaggggcgccaggagcgactgggagtacgcc

SEQ ID NO: 19942 - RNA, 243 nt, synthetic construct
  source 1..243: mol_type = other RNA
accagcgagcccgtgagcttcgccgacgtggccgtgtacttcagccaggaggagtggggctgcctgcagcccgcccagagggccctgtacagggacgtgatgagggagacctacggccacctgggcgccctgggcttcaggggcaccaagcccgccctgatcagctgggtggaggaggaggccgagctgtggggccccgacgccggcccccccgagatgggcgagtgcctgaccgaggccgac

SEQ ID NO: 19943 - RNA, 243 nt, synthetic construct
  source 1..243: mol_type = other RNA
gcccagatgctggtgaccttcaaggacgtggccgtgaccttcacccaggaggagtggaggcagctggacctgacccagaggaccctgtacagggaggtgatgctggagacctgcggcctgctggtgagcctgggccacagggtgcccaagcccgagctggtgcacctgctggagcacggccaggagctgtggaccgtgaagaccggcctgagccagcccacctgcgccggcgacaggacccag

SEQ ID NO: 19944 - RNA, 243 nt, synthetic construct
  source 1..243: mol_type = other RNA
atccagaggctgctgaccttcggcgacgtggccgtggccttcaccaggatcgagtggaggcacctggacgccgcccagagggccctgtacagggacgtgatgctggagaactacggcaacctggtgagcgtgggcctgctgagcagcaagcccaagctgatcgcccagctggagcagggcgccgagccctggatggaggccagggagacccccagcggcaccagggccgtgcccgactactgg

SEQ ID NO: 19945 - RNA, 243 nt, synthetic construct
  source 1..243: mol_type = other RNA
atggacctggtgatgttcagggacgtggccgtggacttcagccaggaggagtgggagtgcctgaacagctaccagaggaacctgtacagggacgtgatcctggagaactacagcaacctggtgagcctggccggctgcagcatcagcaagcccgacgtgatcaccctgctggagcagggcaaggagccctggctggtggtgaggaacgagaagaggaggtggagcctggacctggagagcagg

SEQ ID NO: 19946 - RNA, 243 nt, synthetic construct
  source 1..243: mol_type = other RNA
ttccaggagagcgtgatgttcgaggacgtggccgtgtacttcacccagaaggagtgggccgacctggcccccgcccagagggccctgtacagggacgtgatgctggagaactacggcaacatggtgagcctggccttccccttccccaagcccgccgtgatcagcaagctggagaggggcgaggagccctggggcctggacccccaggtggtgcccaacgaggagggcctgaagggcttcccc

SEQ ID NO: 19947 - RNA, 243 nt, synthetic construct
  source 1..243: mol_type = other RNA
atggacagcgtgaccatcgaggacgtggccgtggacttcaccctggaggagtgggccctgctggaccccagccagaggaagctgtacagggacgtgatgcaggagaccctgaggaacctggccgccgtgggcgccaagagggagtaccacgacatcgaggaccagtacaagaaccagggcaggaagctgaggaccttcatggtggagaggttctgcaagagcaaggacatcagcctgtgcggc

SEQ ID NO: 19948 - RNA, 243 nt, synthetic construct
  source 1..243: mol_type = other RNA
agcaaggtgcccgtgaccttcggcgacctggccatctacttcagccaggaggagtgggagtggctgagccccatccagaaggacctgtacgaggacgtgatgctggagaactaccagaacctggtgagcgtgggcctgagcttcaggaggcccaacgtgatcaccctgctggagaagggcagggccccctggatggtggagcccgtgaggaagaggaggggcatggacagcggcagcaagtgc

SEQ ID NO: 19949 - RNA, 243 nt, synthetic construct
  source 1..243: mol_type = other RNA
gagagcctgaccctggaggacgtggccgtggagttcacctgggaggagtggcagctgctgggccccgcccagaaggacctgtactgggacgtgatgctggagaactacaaccacctggtgagcctgggctaccaggccagcaagcccgacgccctgagcaagctggcccagggcgaggagccctgcgtgatcgagggcaagatccagaacaggaactgccccggcatcaggaaggccgacagc

SEQ ID NO: 19950 - RNA, 243 nt, synthetic construct
  source 1..243: mol_type = other RNA
ctgcagggcctgctgaccttcagggacgtggccatcgagttcagcgaggaggagtggggctgcctgacccacacccagaggcagctgtacagggacgtgatgctggagaactacggccacctgcacttcctgggcctgctgctgagcaagcccgacctgatcatgttcctggagcaggagaagcagctgtgggacgtgaagaggaaggagagcaggggcttcagccccgagagccagtgcctg

SEQ ID NO: 19951 - RNA, 243 nt, synthetic construct
  source 1..243: mol_type = other RNA
ggcagcgtgtgcgaggtgagcgtgagcttcgaggacgtgaccgtggacttcagcagggaggagtggcagcacctggaccccgcccagaggaggctgtactgggacgtgaccctggagaactacagccacctgtgcagcgtgggctaccaggtgcccaagcccgaggtgatcttcaagctggagcagggcgagggcccctggaccctggaggaggagaccccccaccagagctgcagcggcgcc

SEQ ID NO: 19952 - RNA, 243 nt, synthetic construct
  source 1..243: mol_type = other RNA
agccagggcctggtgaccttcggcgacgtggccgtggacttcagccaggaggagtgggagtggctggactgcgcccagaggaccctgtacaggagcgtgatgctggagaactacaggagcctggtgagcctgggcctgtgcgtgagcaagcccgagatgatcagcagcctggagcagaggaaggagccctggaccgtgaagaggaagtggaccaggggccagtgccccgacagcgaggccgtg

SEQ ID NO: 19953 - RNA, 243 nt, synthetic construct
  source 1..243: mol_type = other RNA
agcctgaccctggaggacgtggccgtggacttcacctgggaggagtggcagctgctgggccccgcccagaaggacctgtacagggacgtgatgctggagaactacagcaacctggtggccgtgggctaccaggccagcaagcccgacgccctgagcaagctggagcagggcgaggagccctgcaccaccgaggacgagatctacaccaggatctgctgcggcggccagccccagacctgcagc

SEQ ID NO: 19954 - RNA, 243 nt, synthetic construct
  source 1..243: mol_type = other RNA
agcaaggtgcccgtgaccttcggcgacctggccatctacttcagccaggaggagtgggagtggctgagccccatccagaaggacctgtacgaggacgtgatgctggagaactaccagaacctggtgagcctgggcctgagcttcaggaggcccaacgtgatcaccctgctggagaagggcaaggccccctggatcgtggagcccgtgaggaagaggaggggcgtggacagcggcagcaagagc

SEQ ID NO: 19955 - RNA, 243 nt, synthetic construct
  source 1..243: mol_type = other RNA
caggccgaggtgaccttcgaggacgtggccgtgctgttcagcagggaggagtggggcaggctgggccccgcccagaggggcctgtacagggacgtgatgctggagacctacaggaacctggtgagcctgggcgccggccccgccgcccccaagcccggcgtgatcacccagctggagaggggcgacgagccctgggtgctggacgcccagggcgccaagggcaaggagaggctgagggtgagc

SEQ ID NO: 19956 - RNA, 243 nt, synthetic construct
  source 1..243: mol_type = other RNA
acccaggagagcgtgatgttcgaggacgtggccgtggacttcaccagggaggagtggagccacctggaccccgcccagagggccctgtacagggaggtgatgctggagaactacgagaacctggtgagcctgggcctgcccgtgagcaagctggacgtgatcagcctgctggagaggggcgaggccccctggaggcccgagggcggcggccccaggtgcagctgccccgaccccttcatcgag

SEQ ID NO: 19957 - RNA, 243 nt, synthetic construct
  source 1..243: mol_type = other RNA
ttccaggagagcgtgaccttccaggacgtggccgtggacttcacctgggaggagtggggccacctgggccccgcccagaaggagctgtacagggaggtgatgctggagaactacaggaacctggtgtgcctgggcctggaggtgagcaagcccgacgtggtgtgccagctggagaggggcgaggccccctggatgcccgagggcgccgtgcccaggagctgcagccagaactggggcgccagg

SEQ ID NO: 19958 - RNA, 243 nt, synthetic construct
  source 1..243: mol_type = other RNA
aggcccgagagcgtgaccttcgaggacgtggccatctacttcagcgagaacgagtggaccggcctggcccccgcccagagggccctgtacagggacgtgatgctggagaactacggcgccctggccagcctggccttccccttccccaagcccgccctgatcttccagctggagcagggcgaggccccctggagcagcgccccccagggcgccctggacggcgagggccccaggggcatcagc

SEQ ID NO: 19959 - RNA, 243 nt, synthetic construct
  source 1..243: mol_type = other RNA
atggacagcgtgaccatcgaggacgtggccgtggacttcaccctggaggagtgggccctgctgggccccagccagaggaagctgtacagggacgtgatgcaggagaccctgaggaacctggccgccgtgggcgccaagagggagtaccacgacatcgaggaccagtacaagaaccagggcaggaagctgaggaccttcatggtggagaggctgtgcaagagcaaggacatcagcctgtgcggc

SEQ ID NO: 19960 - RNA, 243 nt, synthetic construct
  source 1..243: mol_type = other RNA
cagcccggcgccgtgaggttcgccgacgtggccgtgtacttcagccccgaggagtggggctgcctgaggcccgtgcagagggccctgtacagggacgtgatgagggagacctacagccacctggtggccctgggcgtgggcggcaccaagcccaagctgatcagctgggtggaggaggaggccgagctgtggggccccgaggcccaggacctggagggcgccaagtgcctgaccgaggccaac

SEQ ID NO: 19961 - RNA, 243 nt, synthetic construct
  source 1..243: mol_type = other RNA
tgctggggcctgctgagcttcaaggacatcagcatggagttcacctgggacgagtggcagctgctggacagcacccagaagtacctgtacagggacgtgatcctggagaactaccacaacctgatcagcgtgggctaccacggcaccaagcccgacctgatcttcaagctggagcagggcgaggacccctggatcatcaacgccaagatcagcaggcagagcaggcccgacggctgggaggag

SEQ ID NO: 19962 - RNA, 243 nt, synthetic construct
  source 1..243: mol_type = other RNA
ttccaggaggccgtgaccttcaacgacgtggccgtggtgttcagcgaggaggagctgggcctgctggacagcacccagaggaagctgtacagggacgtgatgctggagaacttcaggaacctggtgagcctgggccacagcagcagcaagcccgacatgatcagccagctggagagggaggaggagaagctgtgcatgaaggagatcaggaccgagaggggcggcaggaaccccaacgaggcc

SEQ ID NO: 19963 - RNA, 243 nt, synthetic construct
  source 1..243: mol_type = other RNA
agccaggacctggtgaccttcaaggacgtggccatcgacttcagccaggaggagtgggagtggctgaaccccgcccagaggaacctgtacaagaacatgatgctggagaactaccagaacctggtgagcctgggcctgtgcatcagcaagccctacgtgatcagcctgctggagcagggcaagggcccctgggagatgaagaccgagatgaccaggagccccttccccgacagcggcagcgtg

SEQ ID NO: 19964 - RNA, 243 nt, synthetic construct
  source 1..243: mol_type = other RNA
agcctgggcatggtgagcttcgaggacgtggccgtgaccttcagcagggaggagtggcagcagctggacgaggcccagaggaccctgtacagggaggtgatgctggaggcctacagcaacctgaagaccgtgggctgctgctggagcaagcccgaggtgatcatcaggctggagcagggcgtggagccctggaccgtggagggcgtgaccaaccagaggttcagcgacgtgctgaccgtggac

SEQ ID NO: 19965 - RNA, 243 nt, synthetic construct
  source 1..243: mol_type = other RNA
ctgcaggagctgctgagcttcgaggacctgagcgtggacttcacccagaaggagtggcagctgctgaacccctaccagaagaacctgtacaaggacgtgatgctggagaactacagcagcctggtgagcctgggctacgaggtgatcaagcccgacgtgatcttcaagctggagcagggcgaggagccctggatcagggacgccgagatgcccagcagccccagcctggaggtgtggcaggtg

SEQ ID NO: 19966 - RNA, 243 nt, synthetic construct
  source 1..243: mol_type = other RNA
ttccaggagctggtgaccttcagggacgtggccatcgacttcagcaggcaggagtgggagtacctggaccccaaccagagggacctgtacagggacgtgatgctggagaactacagcaacctggtgagcctgggccacagcatcagcaagcccgacgtggtggacctgctggagcagggcaaggagccctggatgctgctgggcgaggagacccagtacagcggcagcaaccccgagcccgtg

SEQ ID NO: 19967 - RNA, 243 nt, synthetic construct
  source 1..243: mol_type = other RNA
gcccacgacctggtggtgttcagggacgtgagcgtggacttcagccaggaggagtgggagtgcctgaacagctaccagaggaacctgtacagggacgtgatcctggagaactacagcaacctggtgagcctgggctgcagcatcagcaagcccgacgtgatcaccctgctggagcagggcaaggagccctggatggtggtgaggaacgagaagaggaggtggaacctggacctggagagcaag

SEQ ID NO: 19968 - RNA, 243 nt, synthetic construct
  source 1..243: mol_type = other RNA
taccagaggcccgtgagcttcaaggacgtggtggtgggcttcacccaggaggagtggcacaggctgaaccccgcccagagggccctgtacagggacgtgatgctggagacctacagcaacctggtgagcgtgggctacgagggcaccaagccctacgtgatcctgaggctggagcaggaggaggccccctggatctgcgaggccgcctgccccggctgccactgcagggagaacatctggcag

SEQ ID NO: 19969 - RNA, 243 nt, synthetic construct
  source 1..243: mol_type = other RNA
ccccaggagcccgtgaccttcgaggacgtggccgtgtacttcacccagaaccagtgggccagcctggaccccacccagagggccctgtacagggaggtgatgctggagaactacgccagcgtggccagcctggtggccttccccttccccaagcccgacctggtgagccagctggagaggggcgaggccccctggagccccgacccctgggaggccgaggtgctgaagggcacctgccccggc

SEQ ID NO: 19970 - RNA, 243 nt, synthetic construct
  source 1..243: mol_type = other RNA
ttccaggaggccgtgaccttcaaggacgtggccgtggtgttcagcgaggaggagctgggcctgctggaccccgcccagaggaagctgtacagggacgtgatgctggagaacttcaggaacctggtgagcgtgggccacagcagcagcaagcccgacatgatcagccagctggagagggaggagaagctgtgcgtgaaggagatccacaccgagaggggcggcaggaaccccaacgaggccgag

SEQ ID NO: 19971 - RNA, 243 nt, synthetic construct
  source 1..243: mol_type = other RNA
atggccttcatggacgtggccgtggacttcacccaggaggagtggaggctgctgagccccgcccagaggaccctgtacagggaggtgatgctggagaactacagcaacctggtgagcctgggcatccccttcagcaagcccaagctgatcaccctgctggagcaggagaaggtgacctggagggagaagaggaagtgccccctggccacctgccccgccgagcccgagcccgagcccgagctg

SEQ ID NO: 19972 - RNA, 243 nt, synthetic construct
  source 1..243: mol_type = other RNA
ggcaaggccctgctgagcttcgaggacgtggccatgtacttcaccagggaggagtggaaccacctggactgggcccagaaggacctgtacagggacgtgatgctggagaactacatgaacatggtgctgctgggcttccagttccccaagcccgaggtgatctgccagctggagaactgggacgagccctggatcctggacctgcccagggccggcaacaggaaggccagcagcagcgcctgc

SEQ ID NO: 19973 - RNA, 243 nt, synthetic construct
  source 1..243: mol_type = other RNA
atgttccaggtgaccttcagcgacgtggccatcgacttcagccacgaggagtggggctggctggacagcgcccagagggacctgtacaaggacgtgatggtgcagaactacgagaacctggtgagcctgggcctgagcatccccaagcccaacgtgatcgccctgctggaggagggcaaggacccctggatggtggagaggaagctgagcaccggcatgttccccgactgggacagcaggtgg

SEQ ID NO: 19974 - RNA, 243 nt, synthetic construct
  source 1..243: mol_type = other RNA
agccagagcctggtgaccttcggcgacgtggccgtggacttcagccaggaggagtgggagtggctgaacagcgcccagaggaacctgtacaggagcgtgatgctggagaactacaggaacctggtgagcctgggcctgtgcgtgagcaagcccgacgtgatcagcagcctggagcagaggaaggagccctggatggtgaagaggaagctgaccaggggcaggtgccccgacctgaagaccgtg

SEQ ID NO: 19975 - RNA, 243 nt, synthetic construct
  source 1..243: mol_type = other RNA
caggccgaggtgaccttcgaggacgtggccgtgctgttcagcagggaggagtggggcaggctgggccccgcccagaggggcctgtacagggacgtgatgctggagacctacaggaacctggtgagcctgggcgccggccccgccggccccaagcccggcgtgatcacccagctggagaggggcgacgagccctgggtgctggacgcccagggcgccgagggcaaggagaggctgagggtgagc

SEQ ID NO: 19976 - RNA, 243 nt, synthetic construct
  source 1..243: mol_type = other RNA
atccaggagcccgtgaccttcaaggacgtggccgtggacttcacccaggaggagtggggccagctggacagcgtgcagaggaccctgtacagggacgtgatgctggagacctacggccacctgctgagcgtgggcaaccacatcgccaagcccgaggtgatcagcctgctggagcagggcgaggagccctggagcgtggagcaggcctacccccagagcacctgccccgagtggatgaggaac

SEQ ID NO: 19977 - RNA, 243 nt, synthetic construct
  source 1..243: mol_type = other RNA
gagcaggtgaccttcaaggacgtggccatcgagttcagcaagaccgagtggaagaggctggaccccgcccagagggccctgtacagggaggtgatgctggagaactacaggaacctggtgagcgtgggcaccagcccccccgacgtgaccgtgatcagcatgctggagcagggcgaggagccctggaccgccgagagcagggtgcagaggcccgaggtgcccggcggcagggagtggacccag

SEQ ID NO: 19978 - RNA, 243 nt, synthetic construct
  source 1..243: mol_type = other RNA
agcagccaggagctgctgaccttcagggacgtggccatcgagttcagccaggaggagtggaggtgcctgaaccacacccagagggagctgtacagggacgtgatgctggagaactacggccacctgctgttcctgggcctgatcgtgagcaagcccgacctggtgagcttcctggagcagaccaaggacccctgggacggcaagagcaagaagaccgtggccttccaccccggcaggtgggag

SEQ ID NO: 19979 - RNA, 243 nt, synthetic construct
  source 1..243: mol_type = other RNA
taccagacccccgtgagcttcaaggacgtggtggtgggcttcacccaggaggagtggcactggctgagccccgcccagagggccctgtacagggacgtgatgctggagacctacagcaacctggtgagcgtgggctacgagggcaccaagcccgacgtgatcctgaggctggagcaggaggaggccccctggatcggcgaggccgcctgccccggctgccactgctggggcatcagcaagctg

SEQ ID NO: 19980 - RNA, 243 nt, synthetic construct
  source 1..243: mol_type = other RNA
cagggcagcgtgaccttcagggacgtggccatcgacttcagccaggaggagtgggagtggctgcagcccgcccagagggacctgtacaggcacgtgatgctggagaactacggccacctggtgagcctgggcctgaacatcagcaagccctacgtggtgagcctgctggagcagggcagggacccctggctggagaaggacgtgaggagggacctgttcagcgagagcagcggcgagatcagg

SEQ ID NO: 19981 - RNA, 243 nt, synthetic construct
  source 1..243: mol_type = other RNA
aagcccgccgccgtgaggttcgccgacgtggccgtgtacttcagccccgaggagtggggctgcctgaggcccgcccagaggaccctgtacagggacgtgatgagggagacctacggccacctgggcgccctgggcttccccggccccaagcccgccctgatcagctggatggagcaggagagcgaggtgtggagccccgccgcccaggaccccgaggagggcgagagcctgggcggcgccagg

SEQ ID NO: 19982 - RNA, 243 nt, synthetic construct
  source 1..243: mol_type = other RNA
agcaaggcccccgtgaccttcggcgacctggccgtgtacttcacccaggccgagtgggagtggctgagccccgtgcagaaggccctgtaccaggacgtgatgctggagaactaccaggtgctggtgagcctgggcctgtgcctgaggaggcccaacctgatcagcctgctggagaagggcaaggccccctgggtggccgagcccgtgaggaggaggaggggccccgacagcgccagcaagttc

SEQ ID NO: 19983 - RNA, 243 nt, synthetic construct
  source 1..243: mol_type = other RNA
gccaggggcctggtgaccttcgaggacgtggccgtgtacttcagcagggaggagtggggcctgctgaacctgacccagaggagcctgtacagggacgtgatgctggagaacttcgccctgatcggcagcctgggcttcgcccccagcaggagccacgtggtggcccagctggagagcgaggaggagctgtgggtgcccagcatggtggacctgaccctgggcagcagggccgaggccaggagg

SEQ ID NO: 19984 - RNA, 243 nt, synthetic construct
  source 1..243: mol_type = other RNA
atgttccaggtgaccttcagcgacgtggccatcgacttcagccacgaggagtggggctggctggacagcgcccagagggacctgtacaaggacgtgatggtgcagaactacgagaacctggtgagcctgggcctgagcatccccaagcccaacgtgatcgccctgctggaggagggcaaggacccctggatggtggagaggaagctgagcaccgactgggacagcaggtgggagaacaaggag

SEQ ID NO: 19985 - RNA, 243 nt, synthetic construct
  source 1..243: mol_type = other RNA
gtgagcttcgaggacgtggccgtgtacttcacccaggaggagtggaccctgctggacagcgcccagagggacctgtacagggacgtgatgctggagacctgcgagaacctggccagcatcggcaacctgctgaaccacagcgtgatgtactggctggagggcgaggagaacctgggcaccgtgcaggagggcgacccccaggagtggaggctgaagaccaagggcagcaccctgaggcccgac

SEQ ID NO: 19986 - RNA, 243 nt, synthetic construct
  source 1..243: mol_type = other RNA
cagccccaggaggccgtgaccttcaaggacgtggaggtgaccttcagccaggacgagtggggctggctggacgccagccagaggaacctgtacagggacgtgatgctggagaactacggcaacgtgaccagcctggtgggccccttcaccaagcccgccctgatcagctggctggaggccagggagccctggggcctgaacgtgcagggcgcccaccccaagggcagccccagcgccgccccc

SEQ ID NO: 19987 - RNA, 243 nt, synthetic construct
  source 1..243: mol_type = other RNA
atgaccttcagcgacgtggccgtggacttcagccagcaggagtgggagtgcctggaccccgtgcagaagaccctgtacagggacgtgatgatggagaactacggcaacctggtgagcctgggccacagcatcagcaagcccgacgtgatcgccctgctggagcagggcaaggagccctgggtggtgaccaaggaggagaccaggaggtgctgcaccgacctggagagcaggtacgagatcatc

SEQ ID NO: 19988 - RNA, 243 nt, synthetic construct
  source 1..243: mol_type = other RNA
atggccttcgaggacgtggccgtgtacttcagcagggaggagtgggagctgctggacaccgcccagagggccctgtacaggcacgtgatgctggagaacttcgccctggtggccagcctgggcttcagccccagcaggccctgcgtggtgatccagctggagagcggcaaggagccctggctgcacagcggcatggacaccaccatgagcaggcacgcccacaagaggcccagcagcggcagc

SEQ ID NO: 19989 - RNA, 243 nt, synthetic construct
  source 1..243: mol_type = other RNA
gcccacggcagcgtgatgttcagcgacgtgagcatcgtgttcagccaggaggagtgggagtacctggacctgaagcagagggacctgtacagggacgtgatgctggagaactacagcaacctggtgagcctgggctgcttcatcagcaagcccgacgtgatcagcctgctggagcagggcaaggagccctggaaggtgatgaggaagggcaggggcaggtaccccgacctggagaccaggtac

SEQ ID NO: 19990 - RNA, 243 nt, synthetic construct
  source 1..243: mol_type = other RNA
gcccacaggagcgtgatgttcaacgacgtgagcatcgacttcagcagggaggagtgggagtacctgaacctggagcagagggacctgtacagggacgtgatgctggagaactacagcaacctggtgagcctgggctacttcatcagcaagcccgacgtgatcagcctgctggagcagggcgaggagccctggaaggtggtgaggaagggcaggaggaggtaccccgacctgaagaccaactac

SEQ ID NO: 19991 - RNA, 243 nt, synthetic construct
  source 1..243: mol_type = other RNA
gcccaggagctggtgaccttcaaggacatcgccatcgacttcacccaggaggagtgggccctgctggacaccagccagaggcagctgtacagggacgtgatgctggagaacatcagccacctggtgagcgtgggctaccacctgtgcaagagcgacgtgatcagccagctggagcagggcgtggagctgtggagggacggcagggagttcctgcagggcctgaaccccgacaggaagagcggc

SEQ ID NO: 19992 - RNA, 243 nt, synthetic construct
  source 1..243: mol_type = other RNA
gcccacgacctggtggtgttcagggacgtgagcgtggacttcagccaggaggagtgggagtgcctgaacagctaccagaggaacctgtacagggacgtgatcctggagaactacagcaacctggtgagcctggccggctgcagcatcagcaagcccgacgtgatcaccctgctggagcagggcaaggagccctggatggtggtgaggaacgagaagaggaggtggaacctggacctggagagc

SEQ ID NO: 19993 - RNA, 243 nt, synthetic construct
  source 1..243: mol_type = other RNA
gagatgggcctgctgaccttcagggacatcgccatcgagttcagcctggccgagtggcagtgcctggaccacgcccagaggaacctgtacagggacgtgatgctggagaactacaggaacctggtgagcctgggcgtggccgtgagcaagcccgacctgatcacctgcctggagcacaacaaggagcccaggaacatcaagaggaacgagatggtgagcaagcaccccgtgacctgcagccac

SEQ ID NO: 19994 - RNA, 243 nt, synthetic construct
  source 1..243: mol_type = other RNA
atggtgttcgaggacgtggccgtgtacttcagcagggaggagtggggcctgctggacagcgcccagagggccctgtacaggcaggtgatgctggagaacttcgccctggtggccagcctgggcctgagcgccagcaggcccaggatcatcctgcagctggagaggggcgaggagccctgggtgctgagcggcctggacgtggccctggccagggacgcccagaggaggcccagccccgcccag

SEQ ID NO: 19995 - RNA, 243 nt, synthetic construct
  source 1..243: mol_type = other RNA
gcctgggcccccctgagcttcgaggacgtggccgtgggcttcagctgggaggagtggcagctgctggcccccagccagaaggacctgtacagggacgtgatgctggagaactacaggaacctggtgagcgtgggctaccaggccagcaagcccgacagcgtgttccagctggagcagggcgagcccccctggatcgtggagggcgccgcccagagccagacctgccaggaggagatctgggag

SEQ ID NO: 19996 - RNA, 243 nt, synthetic construct
  source 1..243: mol_type = other RNA
agccagggcagggtgaccttcgaggacgtgaccgtgaacttcaccaagggcgagtggcagaggctgaaccccgagcagaggaacctgtacagggacgtgatgctggagaactacagcaacctggtgagcgtgggcagggaggagaccaccaagcccaacgtgatcctgaggctggagcagggcaaggagccctggctggtggaggaggaggtgctgggcagcggcaggcccgagaagaacggc

SEQ ID NO: 19997 - RNA, 243 nt, synthetic construct
  source 1..243: mol_type = other RNA
atgcccgtgaccttcgaggacgtggccgtgaccttcacccaggaggagtggggccagctggaccccgcccagaggaccctgtaccaggaggtgatgctggagacctgcggcctgctggtgagcctgggctgccccctgcccaagcccgagctgttctaccccctggaccacagccccgagctgcacaccctgaagaggggcctgagccccaacagctgccccggcgacagcaccaagcccggc

SEQ ID NO: 19998 - RNA, 243 nt, synthetic construct
  source 1..243: mol_type = other RNA
agccagagcctggtgaccttcggcgacgtggccgtggacttcagcagggaggagtgggagtggctgagcagcgcccagaggaacctgtacaggaccgtgatgctggagaactacaggaacctggtgagcctgggcctgtgcatcagcaagcccgagatgatcagcagcctggagcagaggaaggagccctggatggccaagaggaggctgaccaggggcaggtgccccgacctgaagatcgtg

SEQ ID NO: 19999 - RNA, 243 nt, synthetic construct
  source 1..243: mol_type = other RNA
agcctgggcatggtgagcttcgacgacgtgatggtgaccttcagcctggaggagtggcagctgctgagcaccagccagaggaccctgtacaggaccgtgatgctggacacctacagcagcctggccgccctgggccactgcgccgtgaagcccggcgtgatcatcaagctggagcagggcgccgagccctggatgggcgcccaggccccccccaggagcctgagcgacccctgcggccccagc

SEQ ID NO: 20000 - RNA, 243 nt, synthetic construct
  source 1..243: mol_type = other RNA
aggcccgagctggtgaccttcgaggacgtggccgtgtacttcagcgagaacgagtggaccagcctggcccccacccagagggtgctgtacagggacgtgatgctggagaactacggcgccgtggccagcctggccgtgcccttccccaagcccgccctgatcagccagctggagaggggcgaggccccctggtgcaaggccccccagggcgccctggacggcgagggccccaggggcatcagc

SEQ ID NO: 20001 - RNA, 243 nt, synthetic construct
  source 1..243: mol_type = other RNA
gagctggtgatgttcagggacgtggccatcgacgtgagccaggaggagtgggagtgcctgaaccccgcccagaggaacctgtacaaggaggtgatgctggagaactacagcaacctggtgagcctgggcctgagcgtgagcaagcccgccgtgatcagcagcctggagcagggcaaggagccctggatgttcgtgagggaggagaccggcaggtggtgcagcgacctggccagcagggacgag

SEQ ID NO: 20002 - RNA, 243 nt, synthetic construct
  source 1..243: mol_type = other RNA
ttccagggcagcgtgaccttcagggacgtggccatcgacttcagccaggaggagtgggagtggctgcagcccgcccagagggacctgtacaggcacgtgatgctggagaactacggccacctggtgagcctgggcctgaacatcagcaagccccacgtggtgagcctgctggagcagggcagggacccctggcccgacaacggcgccgtgggcggcggcctgttcagcgagagcaagggcgag

SEQ ID NO: 20003 - RNA, 243 nt, synthetic construct
  source 1..243: mol_type = other RNA
ctgcagggccagctgaccttcagggacgtggccatcgagttcagcgaggaggagtggaggtgcctgacccacacccagaggcagctgtacagggacatgatgctggagaactacaggcacctgctgttcctgggcctgatcgtgagcaagcccgacctggtgagcttcctggagcagaagaaggacccctgggacgtgaagaggaagaagaccgtggtgttcgaccccggcaggtgggagtgg

SEQ ID NO: 20004 - RNA, 243 nt, synthetic construct
  source 1..243: mol_type = other RNA
ttccagggcagcgtgaccttcagggacgtggccatcgacttcagccaggaggagtgggagtggctgcagcccgcccagagggacctgtacaggcacgtgatgctggagaactacggccacctggtgagcctgggcctggacatcagcaagccctacgtggtgagcctgctggagcagggcagggagccctggctggtgaagggcgacgtgaggagggaccccttcagcgtgagcgagagcaac

SEQ ID NO: 20005 - RNA, 243 nt, synthetic construct
  source 1..243: mol_type = other RNA
gcccacggcagcgtgatgttcaacgacgtgagcatcgtgttcagccaggaggagtgggagtacctggacctggagcagagggacctgtacagggacgtgatgctggagaactacagcaacctggtgagcctgggctgcttcatcagcaagcccgacgtgatcagcctgctggagcagggcaaggagccctggaaggtggtgaggaagggcaggaggcagtaccccgacctggagaccaggtac

SEQ ID NO: 20006 - RNA, 243 nt, synthetic construct
  source 1..243: mol_type = other RNA
gcccacgccctggtgaccttcagggacgtggccatcgacttcagccagaaggagtgggagtgcctggacaccacccagaggaagctgtacagggacgtgatgctggagaactacaacaacctggtgagcctggccggctacagcggcagcaagcccgacgtgatcaccctgctggagcagggcaaggagccctgcgtggtggccagggacgtgaccggcaggcagtgccccggcctgctgagc

SEQ ID NO: 20007 - RNA, 243 nt, synthetic construct
  source 1..243: mol_type = other RNA
gcccagggcagcgtgatgttcaccgacgtgagcatcgacttcagccaggaggagtgggagttcctgaaccccgaccagagggacctgtacaaggacgtgatgctggagaactacagcaacctggtgagcatgggcctgtacatccccaagccccaggtgatcagcctgctggagcagggcaaggagccctggatgatcggcagggagctgaccaggggcctgtgcagcgccctggagagcatg

SEQ ID NO: 20008 - RNA, 243 nt, synthetic construct
  source 1..243: mol_type = other RNA
agccaggagagcgtgagcttcgaggacgtggccgtgtacttcacccagaaccagtgggccagcctggccagcgcccagaggaccctgtacagggaggtgatgctggagaactacgccaacgtgaccagcctggccgccttccccttccccaagcccgacctgatcttccagctggagaggggcgaggcccccggcggcctggacccctggaccagcatcaggagggaggtgaggggcgtgtgc

SEQ ID NO: 20009 - RNA, 243 nt, synthetic construct
  source 1..243: mol_type = other RNA
gcccacggcagcgtgatgttcagcgacgtgagcgtggtgttcagccaggaggagtgggactacctggacgtggagcagagggacctgtacagggacgtgatgctggagaactacaacaacctggtgagcctgggctgcttcatcagcaagcccgacgtgatcagcctgctggagcagggcaaggagccctggaaggtggtgaggaaggagaggaggaggtaccccgacctggagaccaggcac

SEQ ID NO: 20010 - RNA, 243 nt, synthetic construct
  source 1..243: mol_type = other RNA
aagcccggcgccgtgagcttcgccgacgtggccgtgtacttcagccccgaggagtggggctgcctgaggcccgcccagagggccctgtacagggacgtgatgagggagacctacggccacctgggcgccctgggcttccccggccccaagcccgccctgatcagctggatggagcaggagagcgaggcctggagccccgacgcccaggaccccgaggagggcgagagcctgggcggcgccctg

SEQ ID NO: 20011 - RNA, 243 nt, synthetic construct
  source 1..243: mol_type = other RNA
ttccaggaggccgtgaccttcaaggacgtggccgtggccttcaccgaggaggagctgggcctgctggacagcgcccagaggaagctgtacagggaggtgatgctggagaacttcaggaacctggtgagcgtgggccaccagagcttcaagcccgagatgatcagccagctggagagggaggagaagctgtgggtgaaggagatccagacccagatgggcaggtgcaggggcggcaggaaccag

SEQ ID NO: 20012 - RNA, 243 nt, synthetic construct
  source 1..243: mol_type = other RNA
gtgcaggagcccgtgaccttcaaggacgtggccgtggacttcacccaggaggagtggggccagctggacctggtgcagaggaccctgtacagggacgtgatgctggagacctacggccacctgctgagcgtgggcaaccagatcaccaagcccgaggtgatcagcctgctggagcagggcgaggagccctggagcgtggagcaggcctacccccagagcacctgccccgagtggatgaggaac

SEQ ID NO: 20013 - RNA, 243 nt, synthetic construct
  source 1..243: mol_type = other RNA
ttccaggagagcgtgaccttcgaggacgtggccgtgtacttcacccagaaccagtgggccagcctggaccccgtgcagagggccctgtacagggacgtgatgctggagaactacgccaacgtggccgccctggtggccttccccgcccccaagcccgacctgatcagccagctggagaggggcagcgccccctggaggcccgacccctgggaggccgaggtgctgaggggcatctgccccggc

SEQ ID NO: 20014 - RNA, 243 nt, synthetic construct
  source 1..243: mol_type = other RNA
taccagacccccgtgagcttcaaggacgtggtggtgggcttcacccaggaggagtggcacaggctgagccccgcccagagggccctgtacagggacgtgatgctggagacctacagcaacctggtgagcgtgggctacgagggcaccaagcccgacgtgatcctgaggctggagcaggaggaggccccctggatctgcgaggtggcctgccccggctgccacaggtgggaggacatctggcag

SEQ ID NO: 20015 - RNA, 243 nt, synthetic construct
  source 1..243: mol_type = other RNA
ttctgggagagcgtgaccttccaggacgtggccgtggacttcacctgggaggagtggggccacctgggccccgcccagaaggagctgtacagggaggtgatgctggagaactacaggaacctggtgtgcctgggcctggccgtgagcaagcccgacgtgatctgccagctggagcagggcggcgccccctggtggcccgagggcggcgtgcccggcagcagctgcgccgtgtgggacaccagg

SEQ ID NO: 20016 - RNA, 243 nt, synthetic construct
  source 1..243: mol_type = other RNA
agcctgggcagcgtgagcttcaaggacgtgaccgtggacttcagcagggaggagtggcagcagctggacctggcccagaagagcctgtacagggacgtgaccctggagaactacttcaacctgatcagcgtgggctgccaggtgcccaagcccgaggtgatcttcaacctggagcagggcggcgagctgtgcgtgctggacggcggcctgagctgccagaactgcagcgacggcgacatcggc

SEQ ID NO: 20017 - RNA, 243 nt, synthetic construct
  source 1..243: mol_type = other RNA
aagcaggtgagcatcagcttcgaggacgtgaccgtggacttcagcagggaggagtggcagcacctggaccccgcccagaggtgcctgtacagggacgtgaccctggagaactacagccacctgctgagcgtgggctaccaggtgcccaagcccgagatcatcttccagctggagcagggcgagggcccctggatgctggagagggagaccccccaccagagctgcagcgacgaggacatcggc

SEQ ID NO: 20018 - RNA, 243 nt, synthetic construct
  source 1..243: mol_type = other RNA
agccagagccccctgaccttcggcgacgtggccgtggagttcagcggcgacgagtgggcctggctggacagcgcccagaggagcctgcacaggagcgtgatgctggagaactacaggaacctggccagcctgggcctgtgcatgagcaagcccgagatgatcagcagcctggagcagagcaaggagccctgggccgtgaaggccaagagcaccaggggcaggtgccccggcctggaggccatc

SEQ ID NO: 20019 - RNA, 243 nt, synthetic construct
  source 1..243: mol_type = other RNA
gtgaccttcgaggacgtggccgtgtacttcagctgggaggagtggggcctgctggacgaggcccagaggtgcctgtaccaggacgtgatgctggagaacctggccctgatcaacagcctgggcctgaggcacggcgccgaggacgaggacgcccccgagcacagggtgagcgtgcaggccgccagccaggtgggcaccaggaaggccgtggtgagcccccagaaggcccaccccagggaggtg

SEQ ID NO: 20020 - RNA, 243 nt, synthetic construct
  source 1..243: mol_type = other RNA
caggccgaggtgaccttcgaggacgtggccgtgctgctgagccaggaggagtggggcctgctgggccccagccagaagggcctgtacagggaggtgatgctggagacctacaggaacctgctgagcctgggcgtgggcctggccgaccccaagcccgaggtgatcgtgcagctggagaggggcgacgagctgtgggtgctggacatgcacggcgccgagcagcccagcgtggacggcagcgcc

SEQ ID NO: 20021 - RNA, 243 nt, synthetic construct
  source 1..243: mol_type = other RNA
cccaaggcccccgtgaccttcggcgacgtggccatctacttcagcaaggaggagtgggagtgcctgagccccaaccagaaggacctgtacgaggacgtgatgatggagaactaccagaacctggccagcatcggcttcagctgcaggaggcccaacgtgatcaccctgctggagaagggcgaggccccctggatggccgagcccctgaggaggaggcagggccccgacagcggcagcaagaag

SEQ ID NO: 20022 - RNA, 243 nt, synthetic construct
  source 1..243: mol_type = other RNA
ctggacgcccccgtgaccttcgaggacgtggccgtgtacttcagcgagaacgagtggacctgcctgacctgcccccagagggccctgtacagggacgtgatgctggagaactacggcgccgtggccagcctggccttcctgttccccaagcccgccctgatcagcaggctggagaggggcgaggccccctggtgcagcgccccccagggcgccctggacggcgagggctggaagggcgtgagc

SEQ ID NO: 20023 - RNA, 243 nt, synthetic construct
  source 1..243: mol_type = other RNA
ggcagggtgaccttcagggacgtggccgtggagttcagcctggccgagtggaagtgcctgaaccccgtgcagagggccctgtacagggaggtgatgctggagaactacaggaacctggagttcgtggacagcagcctgaagagcatgatggagttcagcagccacgagcacagcaacaccggcgagggcttccacaccggcaccctggagaggcacaagagctaccacatcggcgacttctgg

SEQ ID NO: 20024 - RNA, 243 nt, synthetic construct
  source 1..243: mol_type = other RNA
agcctgggcagcgagctgttcagggacgtggccatcgtgttcagccaggaggagtggcagtggctggcccccgcccagagggacctgtacagggacgtgatgctggagacctacagcaacctggtgagcctgggcctggccatcagcaagcccgacgtgatcagcttcctggagcagggcaaggagccctggatggtggagagggtggccaccggcgacctgtgccccgtgctggagagcggc

SEQ ID NO: 20025 - RNA, 243 nt, synthetic construct
  source 1..243: mol_type = other RNA
agccagggcctggtgagcttcaaggacgtggccgtggacttcacccaggacgagtggcagcagctggaccccgcccagaggaccctgtacagggacgtgatgctggagaactacagccacctggtgagcatgggctaccccgtgagcaagcccgacgtgatcagcaagctggagcagggcgaggacccctggatcatcaagagggacatcagcaactggatctaccccgacgagaaccaggcc

SEQ ID NO: 20026 - RNA, 243 nt, synthetic construct
  source 1..243: mol_type = other RNA
ctgcaggaggccgtgaccttcgaggacgtggccgtgaacttcagcaacgaggagtggcagtgcctgacccacgcccagaggcacctgtacaaggacgtgatgctggagaactacggcaacgtggtgagcctgggcttccccttccccaagccccccctgatcagccacctggagcaggaggccgagctgtgcgcccaggacaggcaggacagggagttcctgagctgcagctaccccgtgagc

SEQ ID NO: 20027 - RNA, 243 nt, synthetic construct
  source 1..243: mol_type = other RNA
aggcccggcgccgtgagcttcgccgacgtggccgtgtacttcagccccgaggagtggggctgcctgaggcccgcccagagggccctgtacagggaggtgatgagggagacctacggccacctgggcgccctgggcttccccggccccaagcccgccctgatcagctggatggagcaggagagcgaggcctggagccccgacgcccaggaccccgaggagggcgagagcctgggcggcgccctg

SEQ ID NO: 20028 - RNA, 243 nt, synthetic construct
  source 1..243: mol_type = other RNA
agccagagcctggtgaccttcggcgacgtggccgtggagttcagccccgaggagtgggcctggctggacagcgcccagaggagcctgtacaggagcgtgatgctggagaactacaggagcctggtgagcctgggcctgtgcgtgagcaagcccaagatgatcagcagcctggagcagaggaaggagccctgggccgccaagaggaccctgaccaggggcggctgccccgacagcagggccctg

SEQ ID NO: 20029 - RNA, 243 nt, synthetic construct
  source 1..243: mol_type = other RNA
aagcccgccgccgtgagcttcgccgacgtggccgtgtacttcagcgtggaggagtggggctgcctgaggcccgcccagagggccctgtacagggacgtgatgagggagacctacggccacctgggcgccctgggcttccccggccccaagcccgccctgatcagctggatggagcaggagagcgaggcctggagccccgccgcccaggaccccgaggagggcgagagcctgggcggcgccctg

SEQ ID NO: 20030 - RNA, 243 nt, synthetic construct
  source 1..243: mol_type = other RNA
gtgctgggcctggtgaccttcggcgacgtggccatcgacttcagcagggaggagtgggagtggctgaacagcgcccagaggaccctgcacagggacgtgatgctggagaactacaggaacctggtgagcctgggcctgtgcgtgagcaagcccgacatgatcagcagcctggagcagaggaaggagccctggatggtgaagaggaagctgaccaggggcaggtgccccgacctgaagaccatg

SEQ ID NO: 20031 - RNA, 243 nt, synthetic construct
  source 1..243: mol_type = other RNA
ccccagaagagcgtgaccttcgaggacgtggccgtgtacttcacccaggccgagtgggacggcctgagccccgcccagaggaccctgtacagggacgtgatgctggagaactacggcaacgtggccagcctgggcttccccctgctgaagcccgccgtgatcagccagctggagggcggcggcgagctgggcggccccagccccctggccgccggcaccggcctgaggggcctgtggaccgtg

SEQ ID NO: 20032 - RNA, 243 nt, synthetic construct
  source 1..243: mol_type = other RNA
cccctggagagcgtgaccttcgaggacgtggccatcaacttcacccaggaggagtgggccctgctggacaccagccagaggaacctgttcaggaacgtgatgctggagaacatcagccacctggtgagcatcggctaccagatcagcaagagcgacgtgatcagccagctgaagcagggcaaggagctgaggaagagcaccgtgagcaagcagtgcggcaagagcctgagccagggcagcttc

SEQ ID NO: 20033 - RNA, 243 nt, synthetic construct
  source 1..243: mol_type = other RNA
cagtgcggcctgctgaccttcggcgacgtggccatcgagttcagccaggaggagtggaggtgcctgagccacacccagagggagctgtacagggacgtgatgctggagaactacggccacctgctgttcctgggcctgatcgtgagcaagcccgacctggtgagcctgctggagcagagcaaggagccctgggacgtgaggaggaagaagacccagaggcccagcgtgctgatgggccacgtg

SEQ ID NO: 20034 - RNA, 243 nt, synthetic construct
  source 1..243: mol_type = other RNA
ccccaggacctgatgaccttcgaggacgtggccgtggagttcacctggtgggagtggggccagctggaccccgcccagaaggacctgtacagggaggtgatgctggagaacttcaagaacctggccagcctgggcttccccgtgagcaagccctacatgatctgccagctggaggagggcgaggagccctgcatcctggagagggagatcagcaccggcgtgcacagcgactgggagaggagg

SEQ ID NO: 20035 - RNA, 243 nt, synthetic construct
  source 1..243: mol_type = other RNA
accgagggcctggtgatgttcgaggacgtggccgtgtacttcagcagggaggagtggggcctgctgaacgtgacccagaagggcctgtaccaggacgtgatgctggagaacttcgccctggtgagcagcctgggcctggcccccctgaggagccccgtgttcagccagctggagaacgacgagcagctgtgggtgcccagctgggtggacgagacccccgtgagcagggccgaggccaggagg

SEQ ID NO: 20036 - RNA, 243 nt, synthetic construct
  source 1..243: mol_type = other RNA
accccccagaccctgaagcccagggcccccggcgcctgcagcagggccaggagccccggccccggcatccaggacagcgacgccgtgggcagcgtgaccttcgaggacgtggccgtgtacttcagctgggaggagtgggccctgctggacgaggcccagaggtgcctgtaccacgacgtgatgctggagaacttcgccctgaccagcagcctgggcggccccaccggcggcggcagggtggtg

SEQ ID NO: 20037 - RNA, 243 nt, synthetic construct
  source 1..243: mol_type = other RNA
agcaaggtgcccgtgaccttcggcgacctggccatctacttcagccaggaggagtgggagtggctgagccccatccagaaggacctgtacgaggacgtgatgctggagaactaccagaacctggtgagcctgggcctgagcttcaggaggcccaacgtgatcaccctgctggagaagggcagggccccctggatggtggagcccgtgaggaagaggagggtgctggacagcaggagcaagtac

SEQ ID NO: 20038 - RNA, 243 nt, synthetic construct
  source 1..243: mol_type = other RNA
tgcaacatgagcctgagcttcagcgacgtggccgtggacctgagccaggaggagtgggagtgcatgagccccgcccagagggccctgtacagggacgtgatgctggagaactacagcaacctggtgagcctgggctgcagcacccccaagcccgacatgatcaccctgctggagcaggagaaggagccctggatgatcctgagggagggcaccggcagctggttcaccgacctggagagcgag

SEQ ID NO: 20039 - RNA, 243 nt, synthetic construct
  source 1..243: mol_type = other RNA
aggcccggcgccgtgagcttcgccgacgtggccgtgtacttcagccccgaggagtggggctgcctgaggcccgcccagagggccctgtacaggaacgtgatgagggagacctacggccacctgggcgccctgggcttcgccggccccaagcccgccctgatcagctggctggagaggaagaaggaggtgtggagccccgaggccgaggaccccgaggccggcgccaggcaccccggcagcggc

SEQ ID NO: 20040 - RNA, 243 nt, synthetic construct
  source 1..243: mol_type = other RNA
ttccaggaggtggtgaccttcgaggacgtggccgtgcacttcacccaggccgagtgggccggcctgagcagcgcccagagggccctgcacaggagcgtgatgctggagaactacggcaacctgaccagcctgggctacaccgtgcccaacagcgccctgatcagcctgctggagggcagggacctgccctggggcctggaggcccagaacgacccccccgccgagaggagcacccacgtgtgc

SEQ ID NO: 20041 - RNA, 243 nt, synthetic construct
  source 1..243: mol_type = other RNA
ttccaggagagcgtgaccttcaaggacgtggccgtggacttcacccaggaggagtgggcccagctggaccccccccagaggaacctgtacagggacgtgatgctggagaactacgagcacttcgtgttcctgggcctgcccgtggccaagcccgaggtgatcagccagctggagaggggcgaggtgcccctgttccccgagcagcccgagttcagcaccagcatctgccccgacagcctgaac

SEQ ID NO: 20042 - RNA, 243 nt, synthetic construct
  source 1..243: mol_type = other RNA
ttccaggagagcgtgaccttcaaggacgtggccgtggagttcaccggcgaggagtggaggcagctggacagggcccagaggagcctgttcagggacgtgatgctggagaactacaggaacctggtgagcctgggcctgaccgtggccaagcccaacctgatcttcctgctggagaggggcgaggccccctggaccctgcagaggcagatccccggcggcaccagcagcgactgcccctgctgg

SEQ ID NO: 20043 - RNA, 243 nt, synthetic construct
  source 1..243: mol_type = other RNA
ttccaggccagcgtgagcttcaaggacgtgaccgtggagctgacccaggaggagtggcagcagatgggccccctgcagaggaccctgtacagggacgtgatgctggagaactacaacaacctggtgagcgtgggcagctgcatctacaagcccgagctgatcttcaagctggagcagggcgaggagccctggctgctggaggaggagttcagcaaccagagctaccaggtgctggagcactac

SEQ ID NO: 20044 - RNA, 243 nt, synthetic construct
  source 1..243: mol_type = other RNA
acccaggagcacgtgaccttcagggacgtggccgtgttcttcagccaggacgagtggctgcacctggacagcgcccagagggccctgtacagggaggtgatgctggagaactacagcagcctggtgagcctgggcatccccttcagcatgcccaagctgatccaccagctgcagcagggcgaggacccctgcatggtggagagggaggtgagcgccgacacctgcctgggcttcaagacctgg

SEQ ID NO: 20045 - RNA, 243 nt, synthetic construct
  source 1..243: mol_type = other RNA
gagatggagccccacagccacgccgtgccctgccagcccagcatgagcttcaaggacgtggccgtgaccttcacccaggaggagtggggccagctgaacctggcccagaggaggctgtacaggaacgtgaccctggagacctggagccacctggtgagcctgggcctgctgctgagcaagcccgacgtgatcagctggctggagcagggccaggacccctggagggccgagcagggccccccc

SEQ ID NO: 20046 - RNA, 243 nt, synthetic construct
  source 1..243: mol_type = other RNA
ccccaggagcaggtgaccttcagcgacgtggccgtggacttcaccgtggaggagtggggcaggctggcccccgcccagaaggagctgtacaggagcgtgatgctggagaactacaggaacctggtgtgcctgggcctggccgccagcagccccgacgtgatcggccagctggagaggggcgagggcccctggagggtggagggcaaggtgaggaagggcctgtgcgccgaccagaagaccagc

SEQ ID NO: 20047 - RNA, 243 nt, synthetic construct
  source 1..243: mol_type = other RNA
gccagctgcggcctgctgaccttcagggacgtggccatcgagttcagccaggaggagtggaggtgcctgagccacacccagagggagctgtacagggacgtgatgctggagaactacggccacctgctgttcctgggcctgatcgtgagcaagcccgacctggtgagcttcctggagctgaggaaggacccctgggacgtgaagaggaggaagaccgccggcttcgaccccggcaggtggcag

SEQ ID NO: 20048 - RNA, 243 nt, synthetic construct
  source 1..243: mol_type = other RNA
aggcccagggccgtgaagttcggcgacgtggccctgtacttcagcagggaggagtggggctgcctgaggcccgcccagagggccctgtacagggacgtgatgcaggagacctacggccacctgggcgccctgggctgcgccggccccaagcccgccctgatcagctggctggagaggaacaccgacgactgggagcccgccgccctggacccccagcagtgccccaagggcgtggccgtgcag

SEQ ID NO: 20049 - RNA, 243 nt, synthetic construct
  source 1..243: mol_type = other RNA
aagcccgccgccgtgagcttcgccgacgtggccgtgtacttcagccccgaggagtggggctgcctgaggcccgcccagagggccctgtacagggaggtgatgagggagacctacggcctgctgggcgccctgggcggcggcggcaccaagcccgccctgatctgctgggtggagagggacgccgagctgtggggccccgacgcccaggaccccgccgccgccgccgccaggggctacggcacc

SEQ ID NO: 20050 - RNA, 243 nt, synthetic construct
  source 1..243: mol_type = other RNA
agcctgggccccgtgagcttcaaggacgtggccgtgggcttcacccaggaggagtggaggcagctggagcccgcccagaggaggacctacagggaggtgatgctggagaactacagccacctggtggccgtgggctgccacttcatcaagcccgacgtgatcaccaagctggagaggggcgaggagccctggatcgagggcggcttcctgccccagggctgcgccggcgacgaggtgtggcag

SEQ ID NO: 20051 - RNA, 243 nt, synthetic construct
  source 1..243: mol_type = other RNA
ctgttcgagagcgtgagcttcaaggacgtgaccatcgacttcagctgggaggagtggcagcagctggacttcgcccagaagagcctgtacagggacgtgatgctggagaactacttcaacctgatcagcgtgggctgccaggtgcccaagcccgaggtgatcttcaacctggagcaggtggagaacccctgcatgctgcacaggaagatcagcaggcagagctgcctggacggcgacatcggc

SEQ ID NO: 20052 - RNA, 243 nt, synthetic construct
  source 1..243: mol_type = other RNA
ccccaggtgctggtgagcttcgaggacgtggccgtgttcctgagcagggaggagtggggctgcctgggccccgcccagaggggcctgtacagggacgtgatgctggagacctacaggaacctgatcagcctgggcttccaggacagcaagcccgacgtgatcagcaagctggagaagggcgaggagccctgggccccctacagccccaggatcgaggagggctggatctggagccacggcagc

SEQ ID NO: 20053 - RNA, 243 nt, synthetic construct
  source 1..243: mol_type = other RNA
agccacgagagcgtgaccttcaaggacgtggccgtggacttcacctgggaggagtggggctacctggacaccagccagaaggagctgtactgggaggtgatgctggagaactacaggaacctggtgagcctgggcctggccgacagcaacgtggacatgatcagccagctggagagcggcgaggcccacggcatccccgtggacagcgtgctgaggagctgctggcccgacggcgacaccagg

SEQ ID NO: 20054 - RNA, 243 nt, synthetic construct
  source 1..243: mol_type = other RNA
acccagggccaggtgaccttcagggacgtggccatcgagttcagccaggaggagtggacctgcctggaccccgcccagaggagcctgtacagggacgtgatgctggagaactacaggaacctggccagcctgggcatcagctgcttcgacctgagcatcatcagcatgctggagcagaggaaggagcccttcaccctggagagccaggtgcagatcgccggcaaccccgacggctgggagtgg

SEQ ID NO: 20055 - RNA, 243 nt, synthetic construct
  source 1..243: mol_type = other RNA
gtgcaggagagcgtgaccttcagggacctggccgtggacttcgacatggaggagtggggctacctgtgccccagccagaaggagctgtacagggaggtgatgctggagaactacaggcacctggtgagcctgggcctgctggaggccaagcccgacctgatcagcaggctggagcaggaggagccccaggtgtgggaggtgcaggagggcgccagcggcagcgtgtgcgcctgcaccggcggc

SEQ ID NO: 20056 - RNA, 243 nt, synthetic construct
  source 1..243: mol_type = other RNA
agccaggagagcctgaccttcaaggacgtggccgtggacttcacccaggaggagtggggcaagctggacagcggccagaggtacctgtacagggacgtgatgctggagaactacaggaacctggtgagcctgggccaccagggcagcaagccctacgtgatcagccagctggagcagggccaggagccctggatcgtggagagggagatcagcaggggcaactgcaaggactggggcaccagg

SEQ ID NO: 20057 - RNA, 243 nt, synthetic construct
  source 1..243: mol_type = other RNA
gcccagggccaggtgaacttcgaggacgtggccgtgtacttcagccccgaggagtggggcctgctggacgaggcccagaggctgctgtacagggacgtgatgctggagaacctggccctgatggccagcctgggctacgagagcagcatgagccacggcttcgccagcctggagctgggcagcaagccctggggcagcgactgggccgacgtgacccccgccaggaccagggacacccagggc

SEQ ID NO: 20058 - RNA, 243 nt, synthetic construct
  source 1..243: mol_type = other RNA
caccagatcagcgtgaccttcgacgacgtggccctggacttcacccaggaggagtggatcctgctggacctgagccagaggaacctgtacaggaacgtgatgctggagaactaccagaacctggtgaccgtggagtaccagctgagcaagcccaagctgatcgcctggctggagcagcaggagctgagggccgtggagcagggcatcctgcaggagtgggagaccggcctgcagaccaagggc

SEQ ID NO: 20059 - RNA, 243 nt, synthetic construct
  source 1..243: mol_type = other RNA
gacagcgtggccttcgaggacgtggccatcaacttcacctgcgaggagtgggccctgctgggccccagccagaagagcctgtacagggacgtgatgcaggagaccatcaggaacctggactgcatcggcatgaagtggcagaacctggacatcgaggaggacgagtacaagaaccccggcaggaacctgaggtgcttcatggtggagaggagctgcgagatcaaggacaacagccagtgcggc

SEQ ID NO: 20060 - RNA, 243 nt, synthetic construct
  source 1..243: mol_type = other RNA
ctgcaggagcccctggagttcatggacgtggccatcgagttcagcctggaggagtggcactgcctggacaccgcccagaggaacctgtacagggacgtgatgctggagaactacaggaacctggtgttcctgggcatcgtggtgagcaagcccgacctgatcacctggctggagcagggcaagaagcccctgaccgtgaagaggaggggcatgatcgccgccccccccggcatgagcagccac

SEQ ID NO: 20061 - RNA, 243 nt, synthetic construct
  source 1..243: mol_type = other RNA
atggtgagcttcgaggacgtggccgtgctgctgagccaggaggagtgggactgcctgatccccgcccagaggggcctgtacagggacgtgatgctggagacctacggcaacctggtgagcctgggcctgcaggccagcaagcccgacgtgatcagcaggctggagcagggcgacaagccctggaccccccacatcctgaggacccagaggagctggagctggaggcacaagagggagtgctac

SEQ ID NO: 20062 - RNA, 243 nt, synthetic construct
  source 1..243: mol_type = other RNA
ctgagcacccagctgaccgtggaggacgtggacatcaagttcacccccgaggagtgggagtgcctggaccccgcccagaggaccctgtacagggacgtgatggaggagacctacaggaacctgctgagcgtgggcatcggccccaggctgcccgactgcagcagctgcatccacatgaccaagaagctgcaggccaaggagaacagcggcaagggcgagatcctgcagagggtgatgtgcggc

SEQ ID NO: 20063 - RNA, 243 nt, synthetic construct
  source 1..243: mol_type = other RNA
gacaagaccatcatcgccttcggcgacgtggccgtggccttcaccgagagggagtggaagctgctgagccccgcccagaggaccctgtacagggacgtgatgctggagacctacagccacctggtgagcctgggcatcgccttcagcaagcccaagttcatcacccagctggagcagggcgacgagccctggagggaggagagcgagtgcctgctggagctgtgccccgagcccaggaccgag

SEQ ID NO: 20064 - RNA, 243 nt, synthetic construct
  source 1..243: mol_type = other RNA
agccaggagcccgtgaccttcgccgacgtggccgtggtgttcacccccgaggagtgggtgttcctggacagcacccagaggagcctgtacagggacgtgatgctggagaactacaggaacctggccagcgtggccgaccagctgtgcaagcccaacgccagcagctacctggagcagaggggcgagcagtggaccaccgacaggggcatcctggccgacacctgcgccgagccccagctgcag

SEQ ID NO: 20065 - RNA, 243 nt, synthetic construct
  source 1..243: mol_type = other RNA
gcccacaggagcctgatgttcagcgacgtgagcatcgtgttcagccaggaggagtgggagtacctggacctggagcagagggacctgtacagggacgtgatgctggagaactacagcaacctggtgagcctgggctgcttcatcagcaagcccgacgtgatcagcctgctggagcagggcaaggagccctggaaggtggtgagaaagggcaggaggaggtacgccgcccccatgagcatcgcc

SEQ ID NO: 20066 - RNA, 243 nt, synthetic construct
  source 1..243: mol_type = other RNA
ccccaggtgagcctgaccttcgaggacgtggccgtgctgttcaccagggacgagtggaggaagctggcccccagccagaggaacctgtacagggacgtgatgctggagaactacaggaacctggtgagcctgggcctgcccttcaccaagcccaaggtgatcagcctgctgcagcagggcgaggacccctggaaggtggagaaggacagcagcggcggctgcagccccggctgcaagagcaac

SEQ ID NO: 20067 - RNA, 243 nt, synthetic construct
  source 1..243: mol_type = other RNA
ctgcccggcctgatggccttcgaggacgtggccgtgtacttcagccaggaggagtggggcctgctggacgccgtgcagagggccctgtacaggcacgtgatgctggagaacttcgccctggtggccagcctgggcctgagcgccagccccccccacgtggtgatccagctgcagaggggcgaggagccctgggtgcccagcggcctggacatgaccagcgccaggaacggccacaggaggccc

SEQ ID NO: 20068 - RNA, 243 nt, synthetic construct
  source 1..243: mol_type = other RNA
atccaggagctggtgaccttcaaggacgtggccgtggacttcacccaggaggagtggggcctgctgaacaacccccagaaggagctgtacaaggaggtgatgctggagaacgcccagaacatgctgagcctgggcctgcccgtgcccagggaggacctgttcagctacttcgaggagagggaggccccctggctgctggagcaggagggcctgaggagctgctgcgccgagagggagatcagg

SEQ ID NO: 20069 - RNA, 243 nt, synthetic construct
  source 1..243: mol_type = other RNA
gaccacgagctggtgaccttcagggacgtgatcatcaacttcagccaggacgagtgggagtacctgaacagcgcccagagggacctgtactgggacgtgatgatggagaactacagcaacctggtgagcctgggctgcttcatcagcaagcccgacgtgatcagcctgctggagcagggcaaggagccctggaaggtggtgaggaaggagaggaggaggtaccccgacctggagaccaggcac

SEQ ID NO: 20070 - RNA, 243 nt, synthetic construct
  source 1..243: mol_type = other RNA
agccaggagcccgtgaccttcgaggacgtggccgtgtacttcacccagaaccagtgggccagcctggaccccacccagagggccctgtacagggaggtgatgctggagaactacgccaacatcaccagcctggccttccccttccccaagcccgacctgatcctgcagctggagaggggcgaggccaggtggggcctggacccctggatcgccatcgagggcgaggccctgggcggcgtgcac

SEQ ID NO: 20071 - RNA, 243 nt, synthetic construct
  source 1..243: mol_type = other RNA
ttccaggagctggtgaccttcagggacgtggccatcgacttcagcaggcaggagtgggagtacctggacagcgtgcagagggacctgtacagggacgtgatgctggagaactacaggaacctggtgagcctgggccacagcatcagcaagcccgacgtggtggacctgctggagcagggcaaggagccctggatgatcctgagggaggagacccagaggcagtacaccgacctggacctgcac

SEQ ID NO: 20072 - RNA, 243 nt, synthetic construct
  source 1..243: mol_type = other RNA
agctacggcagcctgagcttcgaggacgtgaccgtgggcttcagccaggaggagtggcagcacctggaccccgcccagaggaccctgtacagggacgtgatgctggagaactacagccacctggtggccgtgggctgctgcgtgcccaagcccgacgtgatcttcaggctggagcagggccagcagccctggctgatcgaggaggagagcctggaccagagctgccccgaggtgtgcagggtg

SEQ ID NO: 20073 - RNA, 243 nt, synthetic construct
  source 1..243: mol_type = other RNA
caggccggcagcgacctgttcagggacgtggccatcgtgttcagccaggaggagtgggagcagctggcccccacccagagggacctgtacagggacgtgatgctggagacctacagcaacctggtgagcctgggcctggccgtgagcaagcccgacgtgatcgccttcctggagcagggcagggagccctggaccgtggagggcgtggccaccggcggcctgtgccccgtgctgaagagcagg

SEQ ID NO: 20074 - RNA, 240 nt, synthetic construct
  source 1..240: mol_type = other RNA
ctgcagggcctgctgaccttcggcgacgtggccatcgagttcagccaggaggagtggaggtgcctgagccacacccagagggagctgtacagggacgtgatgctggagaactacggccacctgctgttcctgggcctgaccgtgagcaagcccgacctggtgagcttcctggagcagaggaaggagccctgggacgagaagaggaacaagaccgccggcttcgacgccagcaggtgggag

SEQ ID NO: 20075 - RNA, 243 nt, synthetic construct
  source 1..243: mol_type = other RNA
agcagccagaccctgctgaccttcagggacgtggccatcgagttcagccaggaggagtggggctgcctgaaccacagccagagggagctgtacagggacgtgatgctggagacctacggccacctgctgttcctgggcctggtgagcaagcccgacctggtgatcgtgctggagcagaagaaggagctgtggggcgtgaagaggaaggagaccgtggccagccaccccgccgtgagcagccag

SEQ ID NO: 20076 - RNA, 243 nt, synthetic construct
  source 1..243: mol_type = other RNA
aggaagaggggcagcctgaccctggaggacgtggccgtggacttcacctgggaggagtggcagctgctggcccccgcccagaaggccctgtaccaggaggtgatgctggagaactacggcaacctggtgttcgtgggctaccaggccagcaagcccgccgccctgagcaggctggagaggggcgagccctggcccgtggaggacgaggtgcacagccagctgtgccccgagatgaggaaggac

SEQ ID NO: 20077 - RNA, 243 nt, synthetic construct
  source 1..243: mol_type = other RNA
ctgcccctgaccttcgaggacgtggccgtgtacttcagcgagcaggagtggcagaacctggaggcctggcagaaggagctgtacaagcaggtgatgagggccaactacgagatcctgctgagcctggacaacggcctgcccaagcccgagctgatcagctggatcgagcagggcaaggagctgttcaagaagtggggcgagagccagcagagcaggagcatcatctgcagcagcgccgacctg

SEQ ID NO: 20078 - RNA, 243 nt, synthetic construct
  source 1..243: mol_type = other RNA
aggcccggcgccgtgagcttcgccgacgtggccgtgtacttcagccccgaggagtggggctgcctgaggcccgcccagagggccctgtacagggacgtgatgagggagacctacggccacctgggcgccctgggcttcgccggccccaagcccgccctgatcagctggctggagaggaagaaggaggtgtggagccccgaggccgaggaccccgaggccggcgccaggcaccccggcagcggc

SEQ ID NO: 20079 - RNA, 243 nt, synthetic construct
  source 1..243: mol_type = other RNA
cccctggagagcgtgaccttcaaggacgtggccatcgacttcaccctggaggagtggaggctgatggaccccacccagaggaacctgcacaaggacgtgatgctggagaactacaggaacctggtgagcctgggcctggccgtgagcaagcccgacatgatcagccacctggagaacggcaagggcccctgggtgaccatgaggggcatcagcaggatcccctaccccgacatcgagcccaag

SEQ ID NO: 20080 - RNA, 243 nt, synthetic construct
  source 1..243: mol_type = other RNA
gcccaggagagcgtgatgttcagcgacgtgagcatcgacttcagccaggaggagtgggagtgcctgaacgacgaccagagggacctgtacagggacgtgatgctggagaactacagccacctggtgagcatgggccacagcgtgagcaagcccgacgtgatcagcttcctggagcagggcaaggagccctggctggtggacagggagctgaccagggaccactggcccgtgctggagagcagg

SEQ ID NO: 20081 - RNA, 243 nt, synthetic construct
  source 1..243: mol_type = other RNA
ctgtggctgcccctgaccttcgaggacatcgccatctacttcagcgagcaggagtggcagaacctggaggcctggcagaaggacctgtacaggaacgtgatgagggccaactacgagatcctggtgagcctggacgacggcctgcccaagcccgagctgatcagccacatcgagcagggcaaggagctgttctggaacctgggcgagacccagaagagcggcaacatcatctgcagcagcgcc

SEQ ID NO: 20082 - RNA, 243 nt, synthetic construct
  source 1..243: mol_type = other RNA
ggcctgctgagcttcgaggacgtggccctgtacttcaccagggaggagtgggacaccctggactgggcccagaaggccctgtacagggacgtgatgctggacaactacaggcacatcgtgagcctgggcttccccttccccaagcccgaggtgatctgccagctggagcagtgggaggagccctggaccctggacctgcccagggccggcaccaggaaggccagcggcagcgcctgccccgac

SEQ ID NO: 20083 - RNA, 243 nt, synthetic construct
  source 1..243: mol_type = other RNA
cccaggctgcccctgaccttcgaggacgtggccatctacttcagcgagcaggagtggcaggacctggaggcctggcagaaggagctgtacaagcacgtgatgaggagcaactacgagaccctggtgagcctggacgacggcctgcccaagcccgagctgatcagctggatcgagcacggcggcgagcccttcaggaactggagggagagccagaagagcaggaacatcatctgcagcagcagc

SEQ ID NO: 20084 - RNA, 243 nt, synthetic construct
  source 1..243: mol_type = other RNA
cccagggtgagcctgaccttcgaggacgtggccgtgctgttcaccagggacgagtggaggaagctgggccccagcgagaggaacctgtaccaggacgtgatgctggagaactacagcaacctggtgagcctgggcctgctgttcagcaagcccaaggtgatcagcctgctgcagcagggcgaggacccctggaaggtggagaaggagagccccggcggccccagcctgggctacaagagcagc

SEQ ID NO: 20085 - RNA, 243 nt, synthetic construct
  source 1..243: mol_type = other RNA
agccagggcctggtgaccttcgaggacgtggccgtgtacttcagcctggaggagtggcagaggctggacgccgcccagagggacctgtacaaggaggtgatgcaggagaactacggcatcctggtgagcctgggctaccccatccccaagcccgacctgatcttcaggctggagcagggcgaggagccctgggtgcccgacagccccagccccgaggagggcgacatcgtgaccggcgtgtac

SEQ ID NO: 20086 - RNA, 243 nt, synthetic construct
  source 1..243: mol_type = other RNA
ttccaggagagcgtggccttcgaggacgtggccgtgtacttcacccagaaccagtggggcagcctggaccccgcccagagggccctgtacagcgaggtgatgctggagaactacgccaacgtggccagcctggccttccccttccccaagcccgccctgatcagccacctggagaagggcgaggccccctggggccccgacccctgggacgccgagatccccagcggcatcaaccagggcggc

SEQ ID NO: 20087 - RNA, 243 nt, synthetic construct
  source 1..243: mol_type = other RNA
gagaagggccccctgaccttcagggacgtggccatcgagttcagcctggaggagtggcagtgcctggacaccgcccagcaggacctgtacaggagggtgatgctggagaactacaggaacctggtgttcctgggcatcgccgtgagcaaccccgacctgatcacctgcctggagcagggcaaggagccctggaacatgaagaggcacgccatggccgacgagccccccgtgatgtacagccac

SEQ ID NO: 20088 - RNA, 243 nt, synthetic construct
  source 1..243: mol_type = other RNA
gcccaggcccccctgagcttcgaggacgtggccgtgagcttcagcagggaggagtggaggctgctggtgcccgcccagaaggacctgtacagggacgtgatgctggagaactacaggaacctggtgagcgtgggctaccaggccagcgagcccgacagcctgttcaggctggagcacggcggccccctgtgggtggtggagggcgccgcccccaggcccccctgccccggcgagtacgtggcc

SEQ ID NO: 20089 - RNA, 243 nt, synthetic construct
  source 1..243: mol_type = other RNA
atgctgaccttcagggacgtgttcatcgagttcagccaggaggagtgggagtgcctggaccccgcccagaggaagctgtacatggacgtgatgctggagagctacaggaacctggtgagcctgggccacagcatcagcaagcccgacgtgatcaccctgctggagcagggcaaggacccctgcatggtggtgagggaggagaccaggaggtggtgcaccggcaagaacaagagcggcaggagg

SEQ ID NO: 20090 - RNA, 243 nt, synthetic construct
  source 1..243: mol_type = other RNA
atgttcagcgacgtgagcgtggacttcagccaggaggagtgggagtgcctggaccccggccagagggacctgtacagggacgtgatgctggagaactacagcaacctgctgagcatgggcctgtacatccccaagccccaggtgatcagcctgctggagcagggcaaggagccctggatggtgggcagggagctgaccaggggcctgtgcagcgacctggagagcatgtgcgagaccaagctg

SEQ ID NO: 20091 - RNA, 243 nt, synthetic construct
  source 1..243: mol_type = other RNA
gcccacatgagcctgagcttcagggacgtggccatcgacctgagccaggaggagtgggagtgcctggaccccgtgcagagggccctgtacagggacgtgatgctggagaactacagcaacctggtgagcctgggctgcagcagccccaagcccgacgtgatcaccctgctggagcaggagagggagccctggaccgtgatgagggagggcaccaggagctggtacaccgacctggagagcaag

SEQ ID NO: 20092 - RNA, 243 nt, synthetic construct
  source 1..243: mol_type = other RNA
ttccaggacagcgtgaccttccaggacgtggccgtgaccttcacccccgaggagtggggcaggctggccgccccccagaaggagctgtacagggaggtgatgctggagaacttcggccacctggcctgcctgggcctggccctgagcaagcccgacgtgatctgccagctggagaggggcgaggccccctggatgcccaggggcgacgtgccccagaggcccagcgccgcccccagcggcgac

SEQ ID NO: 20093 - RNA, 243 nt, synthetic construct
  source 1..243: mol_type = other RNA
ttccaggagagcgtgaccttcaaggacgtgagcgtggacttcacccagggcgagtggggccagctggaccccgcccagaagaacctgtacagggacgtgatgctggagaactacaggaccctggtgagcctgggcctgcaggtgttcaagcccgaggtgatctacaggctggagaggggcgaggccccctggatcctggagagggagatcagcaggggcccctgccccgactggcccgagacc

SEQ ID NO: 20094 - RNA, 243 nt, synthetic construct
  source 1..243: mol_type = other RNA
cagatgaggctgaggttcgaggacatcagcgtgagcttcagccaggaggagtgggcctacctggacgaggagcagaaggagctgtacagggaggtgatgagggacaactaccagaccctgatcagcctgggcgtgggcttcagcagcgtgacccccgacatcatcagcaggatcgagcagggcgaggagccctacgtgagggacgagcccggcagcgaggagagggagaccggcaggagcagc

SEQ ID NO: 20095 - RNA, 243 nt, synthetic construct
  source 1..243: mol_type = other RNA
gccagggcccccgtgagcttcgaggaggtggccgtgtacttcagccccgaggagtggcagaccctgcagggctggcagaaggagatgtacaggggcgtgatgagggagaactacgagatcatgctgagcctgggctaccagttcagcaagcccgagatcctgctgatgatggagaggggcgaggagccctgcgtggaggactgccagaggaggatccccgtgaccttcagggagaagcacctg

SEQ ID NO: 20096 - RNA, 243 nt, synthetic construct
  source 1..243: mol_type = other RNA
cagatgcccgtgaagttcgaggacatcgccgtgagcttcagccaggaggagtgggagtacctgaacgaggagcagaaggagctgtacagggaggtgatggaggagaactaccagaccctgatcagcctgggcaccggcagcccccccatcacccccgacatcatcagccacatcgagaggggcgaggagccctacatcagggaggagcccggcagcgaggagaggggccccgtgaggagcagc

SEQ ID NO: 20097 - RNA, 243 nt, synthetic construct
  source 1..243: mol_type = other RNA
cagatgtgggtgaccttcgaggacgtggccgtgagcttcagccaggaggagtgggtgtacctggacgagggccagaaggagctgtacagggaggtgatgaaggagaactacgagaccgtgatgagcctggccggcgaggagttcagcaggggcaaggagaaggagggcagcatcgagcagcagagcctgaagaccgaggtgcacgagatgaacaagagggtgaagctgttcaagtgcagcgag

SEQ ID NO: 20098 - RNA, 243 nt, synthetic construct
  source 1..243: mol_type = other RNA
cagatgcaggtgaagttcgaggacatcgccatcagcttcagccaggaggagtgggagtacctgaacgaggagcagaaggagctgtacagggaggtgatggaggagaactaccagaccctgctgagcctggccaccgacagccccaccttcacccccaagatcatcagctacatcaagaggggcgaggagccctacatcaggggcgagcccgacagcgaggagagggagagcggcaagagcagc

SEQ ID NO: 20099 - RNA, 243 nt, synthetic construct
  source 1..243: mol_type = other RNA
cagatgaggctgaggttcgaggacatcagcgtgagcttcagccaggaggagtgggcctacctggacgaggagcagaaggagctgtacagggaggtgatgagggacaactaccagaccctgatcagcctgggcatcggcagcccccccgtgacccccgacatcatcagctgcatcgagcagggcgaggagccctacatcagggacgagcccggcagcgaggagaggaagaccggcaggagcagc

SEQ ID NO: 20100 - RNA, 243 nt, synthetic construct
  source 1..243: mol_type = other RNA
gagatgagggtgatgttcgaggagatcaccgtgagcttcagccaggaggagtgggagtacctggacgagggccagaaggagctgtaccaggaggtgatgaaggagaaccacgagaccctgatcttcctggagaccaacctgcagttcgtgaaccccgacatgctgagcaagatcaggagggacagcaggatgagcaggaagaggaaggccaccaggagctacgccgccgacgacgaggccaag

SEQ ID NO: 20101 - RNA, 243 nt, synthetic construct
  source 1..243: mol_type = other RNA
cagatgagggtgaccttcgaggacatcagcgtgagcttcagccaggaggagtggggctacctgaacgaggagcagaaggagctgtacagggaggtgatgaaggagaactaccagaccctgatcagcctggccaccgacagccccatcatcgaccccgacatcatcagcaggatcgagaggggcgaggagccctacgtgagggacgagcccgccagcgaggagagggagaccggcaggagcaac

SEQ ID NO: 20102 - RNA, 243 nt, synthetic construct
  source 1..243: mol_type = other RNA
gcccagatgcccgtgaagttcgaggacatcgccgtgagcttcagccaggaggagtgggagtacctgaacgaggagcagaaggagctgtacagggaggtgatggaggagaactaccagaccctgatcagcctgggcagcccccccgtgacccccgacatcatcagccacatcgagaggggcgaggagccctacatcagggaggagcccggcagcgaggagagggagcccggcaggagcagctgc

SEQ ID NO: 20103 - RNA, 243 nt, synthetic construct
  source 1..243: mol_type = other RNA
gcccaggtgcccgtgaccttcgaggacatcgccatctacttcagccaggaggagtgggagtacctggacgagggccagaaggccctgtacagggaggtgatgaaggagaactacgagaccctgctgctgctgggctgccccggcctgaagcccgtgatcatcagcagcatcgagcagggcgaggagccctgcgtgaggaagctgcaggagagggccgagctgtaccccaccgccggcgacgag

SEQ ID NO: 20104 - RNA, 243 nt, synthetic construct
  source 1..243: mol_type = other RNA
ggcatgagggtgaccttcgaggacatcgccgtgagcttcagccaggaggagtgggagtacctgggcgagggccagaaggagctgtacagggaggtgatgaaggagaactacgagaccctgatcagcctgggcaccgacagcagcgccctgacccccgagatcatcagcaggatcgagaggggcgaggagccctgcatcagggacaagcccggcagcgaggagagggagaccggcaagagcagc

SEQ ID NO: 20105 - RNA, 243 nt, synthetic construct
  source 1..243: mol_type = other RNA
gccagcgcccaggtgaccttcgaggacatcgccgtgagcttctgccacgaggagtggaggtacctggacgagggccagaaggagctgtacaaggaggtgatgaaggagaactacgagaccctgatcagcctgggcttcctgtgcgagaagcccagcctgatcagcaagatcgagcaggaggaggacccctgcgtgagggaccagcagaacagcagggagaggaggaggaggctgaagaacttc

SEQ ID NO: 20106 - RNA, 243 nt, synthetic construct
  source 1..243: mol_type = other RNA
cagatgcccgtgaagttcgaggacatcgccgtgagcttcagccaggaggagtgggagtacctgaacgaggagcagaaggagctgtacagggaggtgatggaggagaactaccagaccctgatcagcctgggcatcggcagccccagcgtgacccccgacatcatcagccacatcgagggcggcgaggagccctacatcagggaggagcccggcagcgaggagagggagcccggcaggagcagc

SEQ ID NO: 20107 - RNA, 243 nt, synthetic construct
  source 1..243: mol_type = other RNA
caggtgcccgtgaccttcgaggacatcgccgtgtacttcagccaggaggagtgggaggacctggaggagcagcagagggagctgtacaaggacgtgatgaaggagaactacgagaccctgagcagcctgggcaccggcccccccgccgtgacccccgacatcatcagccacatcgagaggggcgaggagccctacatcaggttcgagagcggccccgaggagagggagatcggcaagagcagc

SEQ ID NO: 20108 - RNA, 243 nt, synthetic construct
  source 1..243: mol_type = other RNA
gtggtggagctgctgaccttcgaggaggtggccgtgtacttcagcaaggaggagtgggccctgctggaccccggccagagggccctgtacagggacgtgatgcaggagaactacgaggccgtgagctggctgggcttccccgtgagcaagaccgacgtgatcagctgggtggagagggaggaggagttctgggtgcccgaccccaggagctgcgaggagggcgtgatcatcagcaacacccac

SEQ ID NO: 20109 - RNA, 243 nt, synthetic construct
  source 1..243: mol_type = other RNA
agccaggagcccgtgagcttcgaggaggtggccgtgtacttcagcagggaggagtgggccctgctggaccccgcccagagggccctgtacagggacgtgatgctggagacctacgagtgcgtggccagcctggcccccctgcccgcccccaagcccatggtgatcagcctgctggaggagggcgaggagccctggatccccgacgtgggcagccccgaggccgtggccggcgacgtgagcccc

SEQ ID NO: 20110 - RNA, 243 nt, synthetic construct
  source 1..243: mol_type = other RNA
gtgagcgagcccgtgaccttcgaggaggtggccctgtacttcagcgaggaggagtgggccctgctggacgccggccagagggccctgtacagggacgtgatgaaggagaactacgaggccgtgaggtggctggacaacggcaggctgaacgagaaccacgacaagagcctgcagaacgagggccccgagcagatggccccctgcggcatgatgctgggcatcagcgagggccacgtgagccag

SEQ ID NO: 20111 - RNA, 243 nt, synthetic construct
  source 1..243: mol_type = other RNA
aagctgaagcccgtgaagttccaggacgtggccgtgtacttcagcgaggaggagtggcagctgctggagaaccagcagaaggagctgtacaggagcgtgatgaaggagaactacgagaacctgaccagcctgggcttcaccaccaccaagcccaacatcctgaagaggatggagcagggcaggcccctgtgggtgagcaccaggaggaaggtgatcaagcacagcttcagggagggcgagccc

SEQ ID NO: 20112 - RNA, 243 nt, synthetic construct
  source 1..243: mol_type = other RNA
gtggccaggatgcagaccagggtgaccttcgacgacatcgccgtgagcttcagccaggaggagtgggagtacctggacgagggccagaaggagctgtacagggaggtgatggaggagaacctggagctgctgaccagcctgggcagcctggtggcccagcccgagcagatggaggagctgtacatgatggaccaccacgacatgggcctgaggggcaccctgctgagcctgtgcaccgaggac

SEQ ID NO: 20113 - RNA, 243 nt, synthetic construct
  source 1..243: mol_type = other RNA
cagatgcaggtgaccttcgaggaggtggccatcagcttcagccaggaggagtgggagtacctggacgaggagcagaaggagctgtacagggaggtgatgaaggagaactaccagaccctgatcagcctggccaccggcagccccaccgtgacccccaagatcatcgcccacatcgagaggggcgaggagccctacatcaggggcgagcccggcagcgaggagagggagaccggcaacagcagc

SEQ ID NO: 20114 - RNA, 243 nt, synthetic construct
  source 1..243: mol_type = other RNA
cagatccccgtgatcttcgaggacatcgtgatctacttcagccaggaggagtggaaggacctggaggagtggcagaaggagctgtacaaggacgtgatgaaggagaactaccagaccctgatcagcctgggcaccggcttccccacccccccccccgacatcatcagccacatcgagaggggcgaggagccctacatcagggacgagctggagagcgagaagagggagaccggcaagaggggc

SEQ ID NO: 20115 - RNA, 243 nt, synthetic construct
  source 1..243: mol_type = other RNA
cagcagatgcaggtgaccttcgaggacgtggccgtgagcttcagccaggaggagtgggagtacctggacgagggccagaaggagctgtacagggaggtgatgaaggagaactacgagaccgtggtgagcctgggcagccccgccagcacccccaagatcatcagctgcatcgagtgcggcgaggaggcctacatcaggggcgagcccggcagcgagggcagggagaccggcaagagcagctgc

SEQ ID NO: 20116 - RNA, 243 nt, synthetic construct
  source 1..243: mol_type = other RNA
cagatgcccatcaagttcgaggacatcgccgtgagcttcagccaggaggagtgggagtacctgaacgaggagcagaaggagctgtacagggaggtgatgaaggagaactaccagaccctgatcagcctgggcaccggcagcccccccgtgacccccgacatcatcagccacatcgagaggggcgaggagccctacatcagggaggagcccggcagcgaggagagggagcccggcaggagcagc

SEQ ID NO: 20117 - RNA, 243 nt, synthetic construct
  source 1..243: mol_type = other RNA
gagcccgtgagcttcgaggaggtggccgtgtacttcagcagggaggagtgggccctgctggaccccgcccagagggccctgtacagggacgtgatgctggagacctacgagtgcgtggccagcctggcccccctgcccggccccaagcccatggtgatcagcctgctggaggagggcgaggagccctggatccccgacgtgggcagccccgaggccgtggccggcgacgtgagccccggcgag

SEQ ID NO: 20118 - RNA, 243 nt, synthetic construct
  source 1..243: mol_type = other RNA
gcccagggcctggtgcccttcgaggaggtggccgtgtacttcaccaggaccgagtgggccctgctggaccccgcccagagggccctgtacagggccgtgatgcaggagaactacgagaacgtgaccagcctgggcttcgccgtgagcaagcccgacgtgatcagccagctggagaggggcgaggagccctgggtgcccgagctgcagggcagcgagcacagggagatcctgggcggcaccggc

SEQ ID NO: 20119 - RNA, 243 nt, synthetic construct
  source 1..243: mol_type = other RNA
gtggagcccgtgagcttcgaggaggtggccgtgtacttcagcgaggaggagtgggccctgctggaccccggccagagggccctgtactgggacgtgatgcaggagaactacgaggccgtgagctggctggtgaggggcaggggcgtgagcaaggcccacgtgatcagctgggtggagaggggcgaggagctgtggatccccgacaggcagggctgcgaggagggcgagagcatcagcgacatc

SEQ ID NO: 20120 - RNA, 243 nt, synthetic construct
  source 1..243: mol_type = other RNA
ttcctgccccaggtgaccttcgaggacgtggccatctacttcagcagggaggagtgggacgagctgagcgagtggcagagggagctgtaccaggccgtgatgatggagaactacgaggccgtgctgagcctgggcaagaacgacttcatcgcccagtgcacctggggcctgagggagggcgagaagagggccagcggcaagagcgagaaggccaggaacaggcccgtgagcaacctgtggagg

SEQ ID NO: 20121 - RNA, 243 nt, synthetic construct
  source 1..243: mol_type = other RNA
cccagcgtgcccgtgaccttcagggacgtgttcgtgcagttcagcagggacgagtgggccctgctggacgacgagcagaaggagctgcaccagagcgtgatgcagagcaactacgagatgctgatgagcctgtactgcgacctggccaagcccgaggtgagcctgcagatggagaggggcgagccctgcctgcccgccgagcccgacctgcagggcaccgccgtgagcctgaaccccgccgcc

SEQ ID NO: 20122 - RNA, 243 nt, synthetic construct
  source 1..243: mol_type = other RNA
ttccagggccccgtgaccttcgacgaggtggccgtgtacttcaccaaggaggagtgggccctgctggaccccgcccagagggccctgtacagggacgtgatgcaggagaactacgagaccgtgaccagcctgggcctgcccgtgagcaggcccgacgtgatcagccagatggagcagggcgaggagccctgggccagcgccctgcagggcagcgaggacaggctgatcctgaggggcatctgc

SEQ ID NO: 20123 - RNA, 243 nt, synthetic construct
  source 1..243: mol_type = other RNA
ttcctgatgcccgtgaccttcgaggaggtggccgtgtacttcacccccggccagggcgccctgctggaccccgcccagagggccctgtacagggacgtgatgcaggagaactacgagaccgtggccagcctgggcttcagcatccccaagcccgacctgatcgcccagctggagcagggcgaggagccctgggtgcccgacctgcagcccagcaaggagatggtgatcctgaggggcatctgc

SEQ ID NO: 20124 - RNA, 243 nt, synthetic construct
  source 1..243: mol_type = other RNA
gtggtggagcccgtgagcttcgaggaggtggccgtgtacttcagcgaggaggagtgggccctgctggaccccggccagagggccctgtactgggccgtgatgcaggagaactacgaggccgtgagctggctgggcttcagcatccccaagcccgacctgatcacccagctggacaggggcgaggagccctgggtgcccgacctgcagcccagcaagaagctggagatcctgaggggcaccagg

SEQ ID NO: 20125 - RNA, 243 nt, synthetic construct
  source 1..243: mol_type = other RNA
gcccaggtgcccgtgaccttcgaggaggtggccgtgtacttcacccagggccagggcgccctgctgggccccgcccagagggccctgtacagggacgtgatgagggagaactacgagatggtgaccagcctgggcttccccgtgcccaagcccgacctggtggccaggctggagaggggcgaggagccctgggtgagcgactgcctggccagcgaggagggcggcaccaggaggggcaggggc

SEQ ID NO: 20126 - RNA, 243 nt, synthetic construct
  source 1..243: mol_type = other RNA
gcccaggtgcccgtgaccttcgaggaggtggccgtgtacttcaccgccggccagggcgccctgctgggccccaaccagagggccctgtacagggacgtgatgcaggagaactacgagaccgtggccagcctgggcttcagcatccccaagcccgacctgatcacccagctggagaggggcgaggagccctgggtgcccgacctgcagcccagcaaggagatggagttcctgaggggcacctgc

SEQ ID NO: 20127 - RNA, 243 nt, synthetic construct
  source 1..243: mol_type = other RNA
gtggccggccccgtgaccttcgaggaggtggccgtgtacttcagcgaggaggagtgggccctgctggaccccggccagagggccctgtacagggacgtgatgcaggagaactacgaggccgtgagctggctgggcttccccgtgagcaagcccggcgagaccagctggctggagagggccggcaagctgcaggagtgggagagcaggagccacgccaacaccgccaggcccaggggcaaccag

SEQ ID NO: 20128 - RNA, 243 nt, synthetic construct
  source 1..243: mol_type = other RNA
agcgagatgagggtgaccttcgaggaggtggccgtgtacttcaccaagggccagggcgccctgctggacgccaggcagaaggccctgtacagggacgtgatgctggagaactacgaggccgtgaccagcctgggcttccccgtgcccaagcccgagctgatcgccaggctggagaggggcgaggagccctgggtgcccgacctgcaggccggcgaggagagggagatcctgaggggcaccagg

SEQ ID NO: 20129 - RNA, 243 nt, synthetic construct
  source 1..243: mol_type = other RNA
gacagcatgagggtgaccttcgaggaggtggccgtgtacttcacccccggccagggcgccctgctgggccccgcccagagggccctgtacagggacgtgatgcaggagaactacgaggccgtgaccagcctgggcttccccgtgcccaagcccgagctgatcgccaggctggagaggggcgaggagccctgggtgcccgacctgcaggccagggaggagagggagatccccaggggcacctgc

SEQ ID NO: 20130 - RNA, 243 nt, synthetic construct
  source 1..243: mol_type = other RNA
gtgaccttcgaggaggtggccgtgtacttcagcgccgaggagtgggccctgctgggccccgcccagagggccctgtacagggaggtgatgagggagaactacgaggccgtgaccagcctggcctgggccggcctgcccatcagcaagcccgacctgatcagctgcatggagaggggcgaggagccctgggtggcccacctgcagagccagaggaggagggagctgcccaggggcaggaacagc

SEQ ID NO: 20131 - RNA, 243 nt, synthetic construct
  source 1..243: mol_type = other RNA
cagatgcccgtgaagttcgaggacatcgccgtgagcttcagccaggaggagtgggagtacctggacgaggagcagaaggagctgtacagggaggtgatgaaggagaactaccagaccctgatcagcctgggcaccggcagccccagcatcacccccgacatcatcagccacatcgagaggggcgaggagccctacatcagggaggagcccggcagcgaggagagggagcccggcaggagcagc

SEQ ID NO: 20132 - RNA, 243 nt, synthetic construct
  source 1..243: mol_type = other RNA
gcccaggtgcccgtgaccttcgaggacatcgccgtgtacttcagccaggaggagtgggaggacctggaggagcagcagagggagctgtacaaggacgtgatgaaggagaactacgagaccctgagcagcctgggcccccccgccgtgacccccgacatcatcagccacatcgagaggggcgaggagccctacatcaggttcgagagcggccccgaggagagggagatcggcaagagcagctgc

SEQ ID NO: 20133 - RNA, 243 nt, synthetic construct
  source 1..243: mol_type = other RNA
gcccagatgagggtgaccttcgaggacatcgccgtgagcttcagccccgaggagtgggagtacctggaccagggccagaaggagctgtacagggaggtgatgaaggagaactacgagatcctgatcagcctgggctgccccaacctgacccccgagatcatcagcaggatcgagaggggcgaggagccctacatcaggggcgagcccggcagcgaggagagggagaccggcaagagcagctgc

SEQ ID NO: 20134 - RNA, 243 nt, synthetic construct
  source 1..243: mol_type = other RNA
cagcaggtgcccgtgaccttcgaggacgtggccgtgagcttcagccaggaggagtggaagtacctggacgaggcccagaagaacctgtactgggaggtgatgaaggagaactacgagaccctgatcagcctggacagcgaggtgcaccaggaggaggagagggagaagaaccaggaggagtaccccatgctgtggggcctgatcagcaggcagagcaggaagaaccacgagaaggtgtactgg

SEQ ID NO: 20135 - RNA, 243 nt, synthetic construct
  source 1..243: mol_type = other RNA
ttccagggccccgtgaccttcgaggaggtggccgtgtacttcaccagcgaggagtgggccctgctggaccccacccagagggccctgtactgggacgtgatgcaggagaactacgagaacgtgaccagcctgggcttccccgtgagcaagccccacatcatcagccagctggagcagggcgccgagccctgggtgcccgacctgcagggcagcgaggagatcctgagcaagcaccagaggatc

SEQ ID NO: 20136 - RNA, 243 nt, synthetic construct
  source 1..243: mol_type = other RNA
ttccccatgcccgtgaccttcgaggaggtggccgtgtacttcacccagggccagggcgccctgctggaccccgcccagagggccctgtacagggacgtgatgcaggagaactacaagatggtgaccagcctggccggcttccccatccccaagcccgacctgatcgcccagctggagaggggcgaggagccctgggtgcccgacctgcaggccgacgaggagagggagagccccaggggcacc

SEQ ID NO: 20137 - RNA, 243 nt, synthetic construct
  source 1..243: mol_type = other RNA
tgccaggagcccgtgagcttcgcccaggtggccgtgtacttcagcagggaggagtgggccctgctggaccccgcccagagggccctgtacagggacgtgatgctggagacctaccagtgcgtggccagcctggcccccctgcccgcccccaagcccgtgctgatcagccagctggagggcgaggaggacccctgcatcagcgacgtgaggagccccgaggccgtgcccggcgacctgagcccc

SEQ ID NO: 20138 - RNA, 243 nt, synthetic construct
  source 1..243: mol_type = other RNA
atgctgagccccgtgaccttcgaggacgtggccgtgtacttcaccgagggccagggcgccctgctggaccccaaccagagggccctgtacagggaggtgatgatggagaactacgagaacatggccagcctgggcttcctgttcatcaagcccgccctgatcagccagctggagcagggcgaggagctgtgggcccccgagagccagggcctggacgccgccgagatcagcgacaccagcgac

SEQ ID NO: 20139 - RNA, 243 nt, synthetic construct
  source 1..243: mol_type = other RNA
gaggagcccgtgagcttcgccgaggtggccgtgtacttcagcagggaggagtgggccctgctggaccccgcccagagggccctgtacagggacgtgatgctggagacctaccagtgcgtggccagcatggagagcctgctgcccgcccccaagcccatcgtgatcagcctgctggagggcggcgaggacctgtggatccccgacatgcagagccccgaggacgtggccggcgacctgaggccc

SEQ ID NO: 20140 - RNA, 243 nt, synthetic construct
  source 1..243: mol_type = other RNA
gagcccgtgagcttcgccgaggtggccgtgtacttcagcagggaggagtgggccctgctggaccccgcccagagggccctgtacagggacgtgatgctggagacctaccagtgcgtggccagcctggtgaccgagacccccgtgcccgcccccaagcccgtgctgatcagcctgctggagggcaggaaggagccctggatccccgacatgaggagccccgaggccatgcccggcgacctgagc

SEQ ID NO: 20141 - RNA, 243 nt, synthetic construct
  source 1..243: mol_type = other RNA
agccaggagcccgtgagcttcgccgaggtggccgtgtacttcagcagggaggagtgggccctgctggaccccgcccagagggccctgtacagggacgtgatgctggagacctaccagtgcgtggccagcctggcccccctgcccgcccccaagcccatgctgatcagcctgctggagggcggcgaggagccctggatccccgacgtgaggagccccgaggccgtgcccggcgacctgagcccc

SEQ ID NO: 20142 - RNA, 243 nt, synthetic construct
  source 1..243: mol_type = other RNA
agccaggagcccgtgagcttcgccgacgtggccgtgtacttcagcagggaggagtgggccctgctggaccccgcccagagggtgctgtacagggacgtgatgctggagacctacgagtgcatcgccagcctggcctgccccgcccccaagcccgccgtgatcagcatgctggagggcgaggaggacccctggatccccgaggacatggccggcgacctgggccccggcgagcccgtgagggag

SEQ ID NO: 20143 - RNA, 243 nt, synthetic construct
  source 1..243: mol_type = other RNA
ggcaagatgcccgtgaccttcgaggacgtggccgtgtacttcagccccgaggagtgggccgagctggccggctggcagaggaggctgtacagggaggtgatgctggagaactaccaggccgtggccagcctgggctggcccgccgtgaagcccgagatcatctgcaagatggagagggaggagatgccctgcatgcccgccccccccagggccaggtggaggcacaggacccccgtgcccgcc

SEQ ID NO: 20144 - RNA, 243 nt, synthetic construct
  source 1..243: mol_type = other RNA
atgaacgccgtgacctacgaggacgtgcacgtgaacttcacccaggaggagtgggccctgctggaccccagccagaagaagctgtacaaggacgtgatggtggagacctacaggaacctgaacgccatcggcttcaactgggaggcccacaacatcgaggagtactgccagagcagcaggaggcacaggaggtgcgagaggagccagagcgccgagaagcccagcgagtacacccagtgcggc

SEQ ID NO: 20145 - RNA, 243 nt, synthetic construct
  source 1..243: mol_type = other RNA
agcgtggagatgctgagcttcagggacgtggccatcgacttcagcgccggcgagctggagtgcctggagcccgcccagtgggacctgtacagggacgtgatgctggagaacttcagccacctggtgttcctgggcttcagcttcagcaagcccctgctggtgaggttcctggagaagaaccaggagctgaggaacgtgaagaggaaggccgccaccgtgcccaggggcaagaagccctacaag

SEQ ID NO: 20146 - RNA, 243 nt, synthetic construct
  source 1..243: mol_type = other RNA
cagctgcaggagaccatgaccttcaaggacgtggaggtgaccttcagccaggacgagtggggctggctggacagcgcccagaggaacctgtacagggacgtgatgctggagaactacaggaacatggccagcctggtgggccccttcaccaagcccgccctgatcagctggctggaggccagggagccctggggcctgaacatgcaggccgcccagcccaagggcaaccccgtggccgccccc

SEQ ID NO: 20147 - RNA, 243 nt, synthetic construct
  source 1..243: mol_type = other RNA
cccgagaccgtggtgagcttcgaggacgtggccgtgaggttcagccccgacgagtggcacctgctggacgacggccagaggaggctgtacagggacgtgctgagggagaactacagccacgtgaggagcctgggcttccccgtgcccgacctggccgtgatcttcaggatggagaggggcgaggagccctggccccccggcctgcccgccggcaccaagagcgacgaccaggaggaggagagg

SEQ ID NO: 20148 - RNA, 243 nt, synthetic construct
  source 1..243: mol_type = other RNA
gcccaggaccccgtgaccttcgacgacatcagcgtgtacttcagcagggacgagtgggccctgctggacgccggccagaagcagctgtacagggaggtgatggccgagaactacagggccctggtgagcgtgggctacgtgatggaggagcccggcctggtgagccacatcgagcacgagcagcagggcagccccatcaggagcaggagcagcctgcacgccggcaggcactgcggcttcatc

SEQ ID NO: 20149 - RNA, 243 nt, synthetic construct
  source 1..243: mol_type = other RNA
cccgagaccgtggtgagcttcgaggacgtggccgtgaggttcagccccgacgagtggcacctgctggacgacggccagaggaggctgtacagggacgtgctgagggagaactacagccacgtgaggagcctgggcttccccgtgcccgacctggccgtgatcttcaggatggagaggggcgaggagccctggccccccggcctgcccgccggcgagtggccctggggccagggccaggccccc

SEQ ID NO: 20150 - RNA, 243 nt, synthetic construct
  source 1..243: mol_type = other RNA
taccaggaggccctgaccttccaggacgtgaaggtgaccttcagccaggaggagtggggctgcctggacagcgcccagaggaacctgtacagggacgtgatgctggagaactacggcaacgtggtgagcgtggtgggcagcagccccaagcccgccctgatcagctggctggaggccaggaagcccagcaccgtgaacatctgcaaggtgcagcccaagagggacagcggcaccgcccccgag

SEQ ID NO: 20151 - RNA, 243 nt, synthetic construct
  source 1..243: mol_type = other RNA
cagccccaggaggccctgaccttcaaggacgtggaggtgaccttcagccaggacgagtggggctggctggacgccagccagaggaacctgtacagggacgtgatgctggagaactacggcaacatcgccagcctgatgggccccttcaccaagcccgccctgatcagctggctggagaccagggagccctgggtgctgaacgtgcagggcgcccagcccgagggcaaccccggcgccgacgtg

SEQ ID NO: 20152 - RNA, 243 nt, synthetic construct
  source 1..243: mol_type = other RNA
ctgctgaccttcgaggacgtggccgtgtacttcaccgaggaggagtgggccctgctggaccccaaccagaagatcctgtacaacgacgtgatgcaggagaactacgagaacgtgatctgcctgggcctgaagctgaagaacgacaccggcaacgaccagcccaccagcgtgagcaccctggagatccaggccagcggctgcaaggtgctgaggaaggccaggatcaaggtggcccagaagacc

SEQ ID NO: 20153 - RNA, 243 nt, synthetic construct
  source 1..243: mol_type = other RNA
cagccccagggcaccgtgaccttcaaggacgtggaggtgaccttcagccaggacgagtggggcctgctggacgccagccagaggaacctgtacagggacgtgatgctggagaactacggcaacatggccagcgtggtgggccccttcaccaagcccgccctgatcagctggctggaggccagggagccctggggcctgaacgtgcagggcgtgcagttcaagggcaaccccggcgccgccccc

SEQ ID NO: 20154 - RNA, 243 nt, synthetic construct
  source 1..243: mol_type = other RNA
cagctgaccttcgaggacgtggccctgagcttcagcaaggaggagtggcagatcatggaccccaaccagaagaccctgtacatcgacgtgatgagggagatctacgagaccgtgaccagcctgggcctgaagctgaagaacgacaccggcaacgaccagcccgtgagcctgagcaccagcgagatccagcccagcggctgcaaggtgctgaggaaggccaggatgaaggtggcccagaccacc

SEQ ID NO: 20155 - RNA, 243 nt, synthetic construct
  source 1..243: mol_type = other RNA
agccaggagctgctgaccttcaaggacatcagcgtggacttcacccaggaggagtggggccagctggcccccgcccacaggaacctgtacagggaggtgatgctggagaactacggcaacctggtgagcgtggccggctgccagctgagcaagcccagcgtgatcagccagctggagaagggcgaggagccctggatgaccgagaaggagggccccggcgaccccagcagcgacctgaagagc

SEQ ID NO: 20156 - RNA, 243 nt, synthetic construct
  source 1..243: mol_type = other RNA
ctgctgaccttcgaggacgtggccgtgttcttcagcgaggaggagtggaagctgctgaaccccacccagaagatcctgtacagcgacgtgatgcaggagaactacgagaccgtgatcagcctgggcctgaagctgaagaacgacaccggcaacgaccagcccatcagcctgagcaccctggagctgcaggccagcggctgcaaggtgctgaggaaggccagggtgaaggtggcccagaagacc

SEQ ID NO: 20157 - RNA, 243 nt, synthetic construct
  source 1..243: mol_type = other RNA
cagaccgacctggtgaccttcgacagcgtggccgtggagttcacccaggaggagtggaccctgctggaccccacccagaggaacctgtacagggacgtgatgctggagaactacaagaacctgagcagcgtgggctaccagctgttcaagcccagcctgatcagctggctggaggaggaggaggagctgagcaccctgcccagggtgctgcaggagtggaagatgtgcctgaagaccaagggc

SEQ ID NO: 20158 - RNA, 243 nt, synthetic construct
  source 1..243: mol_type = other RNA
ctgctgaccttcgaggacgtggccgtgagcttcagcgaggaggagtggaagctgctggaccccgcccagaagatcctgtacaacgacgtgatgcaggagaactacgagaccgtgatcagcctgggcctgaagctgaagaacgacaccggcaacgaccagcccatcagcgtgagcgccctggagatccaggccagcggcaggaaggtgctgaggaaggccaggatgaaggtggcccagaagacc

SEQ ID NO: 20159 - RNA, 243 nt, synthetic construct
  source 1..243: mol_type = other RNA
gccgcccaggagctggtgaccttccaggacgtgttcgtggacttcagccaggaggagctgaacagcctgagcgccgcccagaggaggctgcacagggaggtgaccctggagaactacaggagcctggtgagcctgggctacaggttccccaagcccgacatcatcgcccagctggaggaggaggagagcagggccatggaggaggacggcgacaccaagaccggccccgactgggagaccggc

SEQ ID NO: 20160 - RNA, 243 nt, synthetic construct
  source 1..243: mol_type = other RNA
gcccaggacgccctgaccttccaggacgtggccgtggacttcacctgggaggagtggggccagctggaccccgcccagcagaacctgtacagggacgtgatgctggagaactaccagaacctgatcagcctgggcttccccgtgagcaagcccgaggtgatcagccagctggagcagggcgaggtgccctgggccctgaagagggccgtggccgagggcagctgccccgactgggaggccagg

SEQ ID NO: 20161 - RNA, 243 nt, synthetic construct
  source 1..243: mol_type = other RNA
gccgaggagctggtgaccttcgaggacgtggccgtgcacttcagccccgaggagctgccctacctgagcgccagccagaggaacctgtacagggaggtgatgctggagaactacaggaacctggtgagcctgggctaccagttccccaagcccgacatcatcagccagctggaggaggaggagagccacgccagggaggaggacggcagcaccgtgacctgccaggactgggaggagcagagc

SEQ ID NO: 20162 - RNA, 243 nt, synthetic construct
  source 1..243: mol_type = other RNA
agccagaccctggtgaccttcaaggacgtgttcgtggacttcaccagggaggagtggaagctgctggacaccgcccagcagatcgtgtacaggaacgtgatgctggagaactacaagaacctggtgagcctgggctaccagctgaccaagcccgacgtgatcctgaggctggagaagggcgaggagccctgggtggtggagaggggcatccaccaggagacccaccccgacagcgagaccgcc

SEQ ID NO: 20163 - RNA, 243 nt, synthetic construct
  source 1..243: mol_type = other RNA
ccccaggagcccgtgaccttcgccgacgtggccgtgctgttcacccccgaggagtggctgttcctggacagcgcccagaagagcctgtacagggacgtgatgctggagaactacaggaacctggccagcgtgggcgaccagctgtgcaagaccaggatgagcagccacatggagcagagggaggagctgtgcgtgaccgagaggggcgtgttccccggcgcccagctgggcccccacctgcag

SEQ ID NO: 20164 - RNA, 243 nt, synthetic construct
  source 1..243: mol_type = other RNA
agctacaggagcaagaccatggcccagggcagcctgaccttcagcgacgtggccatcggcttcagccagcaggagtgggagtgcctggaccccgtgcagaagaccctgtacagggacgtgatgatggagaactacggcaacctggtgagcctgggccacagcatcagcaagcccaacgtgatcaccctgctggagcagggcaaggagccctggatcgtggtgagggaggagaccaggagctgg

SEQ ID NO: 20165 - RNA, 243 nt, synthetic construct
  source 1..243: mol_type = other RNA
gccgagctgcccgtggtgttcgaggacgtggccgtgtacttcaccagggaggagtggggcatgctggacaagaggcagaaggagctgtacagggacgtgatgaggatgaactacgagctgatggccagcctgggccccgccgccgccaagcccgacctgatcagcaagctggagaggagggccgccccctggatcaaggaccccaacggccccaagtggggcaagggcaggccccccggcaac

SEQ ID NO: 20166 - RNA, 243 nt, synthetic construct
  source 1..243: mol_type = other RNA
agccaggagctgctgaccttcaaggacatcttcgtggacttcacccaggaggagtggggccagctggcccccgcccacaggaacctgtacagggaggtgatgctggagaactacggcaacctggtgagcgtgggctaccagctgagcaagcccggcgtgatcagccagctggagaagggcgaggagccctggctgatcgagagggagatcagcggcagccccagcagcgacctggagaacaag

SEQ ID NO: 20167 - RNA, 243 nt, synthetic construct
  source 1..243: mol_type = other RNA
gaggagctgcccgtggtgttcgaggacgtggccgtgtacttcaccagggaggagtggggcatgctggacaagaggcagaaggagctgtacagggacgtgatgaggatgaactacgagctgctggccagcctgggccccgccgccgccaagcccgacctgatcagcaagctggagaggagggccgccccctggatcaagcaccccaacggccccaagtggggcaagggcaggccccccggcaac

SEQ ID NO: 20168 - RNA, 243 nt, synthetic construct
  source 1..243: mol_type = other RNA
agccaggagcccgtgaccttcgccgacgtggccgtggtgttcacccccgaggagtgggtgttcctggacagcacccagaggagcctgtacagggacgtgatgctggagaactacaggaacctggccagcgtggccgaccagctgtgcaagcccaacgccctgagctacctggaggagaggggcgagcagtggaccaccgacaggggcatcctgagcgacacctgcgccgagccccagtgccag

SEQ ID NO: 20169 - RNA, 243 nt, synthetic construct
  source 1..243: mol_type = other RNA
ccccaggagcccgtgaccttcgccgacgtggccgtgctgttcacccccgaggagtggctgttcctggacagcgcccagaagagcctgtacagggacgtgatgctggagaactacaggaacctggccagcgtgggcgaccagctgtgcaagaccaggatgagcagccacctggagcagagggaggagctgtgcgtgaccgagaggggcatcttccccggcgcccacctgggcccccacttccag

SEQ ID NO: 20170 - RNA, 243 nt, synthetic construct
  source 1..243: mol_type = other RNA
agccaggagctgctgaccttcaaggacgtgagcgtggacttcacccaggaggagtggggccagctgagcctggcccacaggaacctgtacagggaggtgatgctggagaactacggcaacctggtgagcgtggccggctaccagctgagcaagcccagcgtgatcagccagctggagaagggccaggagccctggatgaccgagaagaagggccccggcgaccccagccccgacctgaagaac

SEQ ID NO: 20171 - RNA, 243 nt, synthetic construct
  source 1..243: mol_type = other RNA
ctgctgaccttcgaggacgtggccctgagcttcaccgaggaggagtggcagctgctggaccccacccagaagatcctgtacaacgacgtgatgcaggagaactacgagaccgtgatcagcctgggcctgaagctgaagaacgacaccggcaacgaccagcccatcagcctgagcaccctggagatccagggcagcggctgcaaggtgctgaggaaggccagggtgaaggtggcccagaagacc

SEQ ID NO: 20172 - RNA, 243 nt, synthetic construct
  source 1..243: mol_type = other RNA
agccagggcctgctgaccttcaaggacatcagcgtggacttcacccaggaggagtggggccagctggcccccgcccacaggaacctgtacagggaggtgatgctggagaactacggcaacctggtgagcgtggccggctaccagctgagcaagcccagcgtgatcagccagctggagaagggccaggagccctggatgaccgagaaggagggccccggcgacagcagcagcgacctgaagaac

SEQ ID NO: 20173 - RNA, 243 nt, synthetic construct
  source 1..243: mol_type = other RNA
ctgctgaccttcgaggacgtggccgtgagcttcagcgaggaggagtggaggctgctggaccccacccagaagagcctgtacaacgacgtgatgcaggagaactacgagaccgtggtgagcctgggcctgaagctgaagaacgacaccggcaacgaccagcccatcagcctgagcgccctggagatccaggccagcggctgcagggtgctgaggaaggccaggatgaaggtggcccagaagacc

SEQ ID NO: 20174 - RNA, 243 nt, synthetic construct
  source 1..243: mol_type = other RNA
agccaggagctgctgaccttcaaggacatcagcgtggacttcacccaggaggagtggggccagctgcccctggcccacaggaacctgtacagggaggtgatgctggagaactacggcaacctggtgagcgtggccggctaccagctgagcaagcccagcgtgatcagccagctggagaagggccaggagccctggatgaccgagaaggaggtgcccgaggaccccagcagcgacctgaggacc

SEQ ID NO: 20175 - RNA, 243 nt, synthetic construct
  source 1..243: mol_type = other RNA
ctgctgaccttcgaggacgtggccctgttcttcaccgaggaggagtggcagctgctggaccccgcccagaagatcctgtactacaacgtgatgcaggagaactacgagaccgtgaccagcctgggcctgaagctgaagaacgacaccggcaacgaccagcccatcagcctgagcaccctggagatccaggccagcggctgcaaggtgctgaggaaggccaggatgaaggtggcccagaagacc

SEQ ID NO: 20176 - RNA, 243 nt, synthetic construct
  source 1..243: mol_type = other RNA
gaggagctgcccgtggtgttcgaggacgtggccgtgtacttcaccagggaggagtggggcatgctggacaagaggcagaaggagctgtacagggacgtgatgaggatgaactacgagctgctggccagcctgggccccgccgccgccaagcccgacctgatcagcaagctggagaggagggccgccccctggatcagggaccccaacggccccaagtggggcaagggcaggcccagcggcaac

SEQ ID NO: 20177 - RNA, 243 nt, synthetic construct
  source 1..243: mol_type = other RNA
cagctgaccttcgaggacgtggccctgagcttcagcaaggaggagtggcagatcatggaccccaaccagaagaccctgtacatcgacgtgatgcaggagatctacgagaccgtgaccagcctgggcctgaagctgaagaacgacaccggcaacgaccagcccgtgagcctgagcaccagcgagatccagcccagcggctgcaaggtgctgaggaaggccaggatgaaggtggcccagaccacc

SEQ ID NO: 20178 - RNA, 243 nt, synthetic construct
  source 1..243: mol_type = other RNA
cagctgcaggagaccatgaccttcaaggacgtggaggtgaccttcagccaggacgagtggggcctgctggacagcgcccagaggaacctgtacagggacgtgatgctggagaactacaggaacatggccttcctggtgggccccttcaccaagcccgccctgatcagctggctggaggccagggagccctggggcctgaacgtgcaggtggcccagcccaagaggaaccccggcgccgccccc

SEQ ID NO: 20179 - RNA, 243 nt, synthetic construct
  source 1..243: mol_type = other RNA
cagccccagggcaccgtgaccttcaaggacgtggaggtgaccttcagccaggacgagtggggcctgctggacgccagccagaggaacctgtacagggacgtgatgctggagaactacggcaacatggccagcgtggtgggccccttcaccaagcccgccctgatcagctggctggaggccagggagccctggggcctgaacgtgcagggcgtgcagctgaagggcaaccccggcgccgccccc

SEQ ID NO: 20180 - RNA, 243 nt, synthetic construct
  source 1..243: mol_type = other RNA
gccgaggtgcccgtggccttcgaggacgtggccgtgtacttcacccaggaggagtggggcagcctggacaagaggcagaaggagctgtacagggacgtgatgtggatgaactacgagctgctggccagcctgggccccgccgccgccaagcccgacctgatcagcaagctggagaggagggccgccccctggatcaaggacaccaggggccccaagtggggcaagggcaagaggaagaccgtg

SEQ ID NO: 20181 - RNA, 243 nt, synthetic construct
  source 1..243: mol_type = other RNA
gaggagctgcccgtggtgttcgaggacgtggccgtgtacttcaccagggaggagtggggcatgctggacaagaggcagaaggagctgtacagggacgtgatgaggatgaactacgagctgctggccagcctgggccccgccgccgccaagcccgacctgatcagcaagctggagaggagggccgccccctggatcaaggaccccaacggcgccaagagcggcggcaagggcaggccccccggc

SEQ ID NO: 20182 - RNA, 243 nt, synthetic construct
  source 1..243: mol_type = other RNA
agccaggagcccgtgaccttcgccgacgtggccgtggtgttcacccccgaggagtgggtgttcctggacagcacccagaggagcctgtacagggacgtgatgctggagaactacaggaacctggccagcgtggccgaccagctgtgcaagcccaacgccctgagctacctggaggagaggggcgagcagtggaccaccgacaggggcgtgctgcccgacacctgcgccgagccccagtgccag

SEQ ID NO: 20183 - RNA, 243 nt, synthetic construct
  source 1..243: mol_type = other RNA
ctgctgaccttcgaggacgtggccgtgagcttcagcgaggaggagtggaggctgctggaccccgcccagaagagcctgtacaacgacgtgatgcaggagaactacgagaccatcgtgagcctgggcctgaagctgaagaacgacaccggcaacgaccagcccatcagcctgagcgccctggagatccaggccagcggctgcagggtgctgaggaaggccaggatgaaggtggcccagaagacc

SEQ ID NO: 20184 - RNA, 243 nt, synthetic construct
  source 1..243: mol_type = other RNA
ttccaggagctggtgaccttcgaggacgtgtgcgtggacttcaccagcgaggagctgagctgcctgagcaccagccagaggaccctgtacagggaggtgatgctggagaactacaggaacctggtgagcctgggccaccagttcagcaagcccgagctgatcagcaggctggaggaggaggagttccaggccatggccgccgacagcagcgccgtggccggcgacagcggcgccgtggccggc

SEQ ID NO: 20185 - RNA, 243 nt, synthetic construct
  source 1..243: mol_type = other RNA
gaggccctgcccgtggtgttcgaggacgtggccgtgtacttcaccagggaggagtggggcgccctggacaagaggcagaaggagatgtacagggacgtgatgaggatgaactacgagctgctggccagcctgggccccgccgccgccaagcccgacctgatcagcaagctggagaggagggccgccccctggatcaaggacccccacggcctgaagtggggcaagggcaggccccccggcaag

SEQ ID NO: 20186 - RNA, 243 nt, synthetic construct
  source 1..243: mol_type = other RNA
cagccccaggaggccatgaccttcaaggacgtggaggtgaccttcagccaggacgagtggggcagcctggacagcgcccagaggaacctgtacagggacgtgatgctggagaactacaggaacatggtgagcctggtgggccccttcaccaagcccgccctgatcagctggctggaggccagggagccctggggcctgaacgtgcaggccgcccagcccaagggcaaccccggcgccgccccc

SEQ ID NO: 20187 - RNA, 243 nt, synthetic construct
  source 1..243: mol_type = other RNA
gaggagctgcccgccgtgttcgaggacgtggccgtgtacttcaccagggaggagtggggcatgctggacaagaggcagaaggagctgtacagggacgtgatgaggctgaactacgagctgctggccagcctgggccccgccgccgccaagcccgacctgatcagcaagctggagaggagggccgccccctggatcaaggaccccaacggccccaagtggggcaagggcggcccccccggcaag

SEQ ID NO: 20188 - RNA, 243 nt, synthetic construct
  source 1..243: mol_type = other RNA
gaggagctgcccgtggccttcgaggacgtggccgtgtacttcaccagggaggagtggggcatgctggacaagaggaggaaggagctgtacagggacgtgatgaggaggaactacgagctgctggccagcctgggccccgccgccgccaagcccgacctgatcagcaagctggagaggggcgccgccccctggatcaaggaccccaacggccccaagtggggcaagggcaagaagaagatggtg

SEQ ID NO: 20189 - RNA, 243 nt, synthetic construct
  source 1..243: mol_type = other RNA
atggccgagggcctgaagttcaaggacgtggccatctacttcagccagaacgagtgggagtgcctgcacagcgcccagaaggacctgtacagggacatcatgctggagaactacaacaacctgatcagcctgggcctgagcgagagcaagcccgacgtgatcagcctgctggagcagaggaaggagccctggatggtggagaggaaggagaccaaggagtggttccccgactgggagagcagg

SEQ ID NO: 20190 - RNA, 243 nt, synthetic construct
  source 1..243: mol_type = other RNA
caggtgcccgtgaccttcgaggacatcaccgtgtacttcagcagggagcagtgggagtacctggacgagggccagaaggagctgtacagggaggtgatgaaggagaactacgagaccctgatcagcctgggcaccggccccgagggcttcaaccccgaggtgctggccaggatcaagctggaggaggagagccacgtgtgggaccccaaggagcccggccagaaggaggtgaccaggagctac

SEQ ID NO: 20191 - RNA, 243 nt, synthetic construct
  source 1..243: mol_type = other RNA
gaggagctgcccgtggtgttcgaggacgtggccgtgtacttcaccagggaggagtggggcgtgctggacaagaggcagaaggagctgtacagggacgtgatgaggatgaactacgagctgctggccagcctgggccccgccgccgccaagcccgacctgatcagcaagctggagaggagggccgccccctggatcaaggaccccaacggccccaagtggggcaagggcagggtgcccgcctgc

SEQ ID NO: 20192 - RNA, 252 nt, synthetic construct
  source 1..252: mol_type = other RNA
ctgacctacgacgacgtgtacgtgaacttcacccaggaggagtgggccctgctgaaccccagccagaagagcctgtacaaggacgtgatgctggagacctacaggaacctgatcgccgtgggctacaactgggaggaccacaacatcgaggagcactgccagagcagcaggaggcacggcaggaacgagaggatcctgaccggcgagaacccctacgagggcatccagtgcggcgaggccttcgtgcaccac

SEQ ID NO: 20193 - RNA, 276 nt, synthetic construct
  source 1..276: mol_type = other RNA
gtgaagttcgacgaggtggccgtggtgttcagcgaggacgagtggaacctgctgaccgaccagcagaggggcctgtacatggaggtgatgaaggagaactacgagcacctgatctacctgggcttcgaggtgcccgtgatcctgagcctgctgcaggacggcggcggcatcggcagcgacaccgtgacccagagcaagagccagcaggtggccggcgccgaggagagcaagagcagcgtgaccctggagggccccatccccgagaccctgcccagc

SEQ ID NO: 20194 - RNA, 279 nt, synthetic construct
  source 1..279: mol_type = other RNA
gtgaccttccaggaggtggccgtgtgcttcaccgaggaggagtgggccctgctggaccccggccagagggccctgtacagggtggtgatgcaggagaactacgaggccgtgaccagcctggtggccaagggcaacaagaacagcctgtgccagaccttctgcctgtgctggggcagccccagcagcatgctgttctgcagccccagcctgctgcagggcctgcagaagccccaggactgcaggggcctgtacggcggcgccccccagtgccagaccgtg

SEQ ID NO: 20195 - RNA, 252 nt, synthetic construct
  source 1..252: mol_type = other RNA
gtgacctacaacgacgtgcacatcgacttcacctgggaggagtggaccctgctggacctgagccagaagaacctgtacaaggacgtgatgctggagacctactggaacctgctgaccatcggctacagctgggaggaccacaacatcgaggagcactgccagagcagcaggaggtacgagaggcacgagaggagccaggccggcgagaagcccagcatctacacccagtgcatcaaggccttcgagcacctg

SEQ ID NO: 20196 - RNA, 249 nt, synthetic construct
  source 1..249: mol_type = other RNA
gtgacctacgacgacgtgtgcatcgacttcacctgggaggagtggaccctgctggaccccagccagaagaagctgtacaaggacgtgatgctggagacctacaggaacctgaccgccatcggctacaactgggagaaccaccacgtggaggagtactaccagagcagcaggaggaacgccaggaacgagaagagccagaccgccgagaagcccagcgtgaacacccagtgcgtgaaggccttcacccac

SEQ ID NO: 20197 - RNA, 252 nt, synthetic construct
  source 1..252: mol_type = other RNA
gtgagcttcgaggacgtggccgtgcacttcacccaggaggagtgggccctgctggaccccagccagaagagcctgtacagggacgtgatgctggagacctgcaggaacctggccgccatcggctacatctgggaggagcagaccatcgaggacgactgcaagaacttcggcaggtaccagaggcacaccatcagccacagcgagtacaccccctacgagcacgaggagtgcggcaacatgccctgcgacccc

SEQ ID NO: 20198 - RNA, 252 nt, synthetic construct
  source 1..252: mol_type = other RNA
gtgacctacgaggacgtgcacgtgaacttcagccacgaggagtgggccctgctggacagcagccagaagagcctgtacagggacgtgatgctggagacctgcaggaacctgatggccatcggctacaggctggaggaccacaacatcgaggagcactgccagagcagcaggaggcccggcaggtacaacatctgcaactgcggctacaagccctgcgagaacgaggaccacggcaagaagcagtgcaccttc

SEQ ID NO: 20199 - RNA, 249 nt, synthetic construct
  source 1..249: mol_type = other RNA
atgacctacgacgacgtgcacgtgaacttcaccggcgaggagtgggccctgctgagccccagccagaagaggctgtacaaggacgtgatgctggagacctacaggaacctgaccgccatcggctacaactgggaggaccacaacagcgagcacttccagcacagcaggaggcacggcaggcacgagaggaggcacaccggcgagaagcccagcgtgtacacccagtgcggcaaggtgttcgcctaccac

SEQ ID NO: 20200 - RNA, 279 nt, synthetic construct
  source 1..279: mol_type = other RNA
gtgacctacgaggacgtgcacgtgaacttcacccaggaggagtgggccctgctggaccccagccagaagaagctgtacaaggacgtgatgctggagacctacaggaacctgaacgccatcggcttcagctgggaggcccagaacatcgaggagcactgccagagcttcggcaggcacaggaggtgcgagaggagccagagggccgagaagcccagcgagtacacccagcccgacaagggcttcgccctgagggcccacagccacgcccagaggcacgag

SEQ ID NO: 20201 - RNA, 252 nt, synthetic construct
  source 1..252: mol_type = other RNA
ctgacctacgacgacgtgcagatcaacttcaccagcgaggagtggagcctgctggacaccagccagaagaacctgtacaaggacgtgatgctggagacctacaagaacctgaccgacatcggctacacctgggaggactgcagcatcgaggagcactgcgccagcagcaagaggaaggagaggcccaagaggagccagaccggcgagaagcccagcgcctacacccagtgcgccaaggacttcgcctacagc

SEQ ID NO: 20202 - RNA, 252 nt, synthetic construct
  source 1..252: mol_type = other RNA
atcacctacgacgacgtgcacgtgaacttcacctgggaggagtggaccctgctggaccccttccagaagaacctgtacaaggacgtgatgctggagacctacaggaacctgaccaccatcggctacagctgggaggacagcaacatcgaggtgcactgccagagcagcggcaggcacgagaggcacgagaggagccacaccggcgagaagcccagcgtgtacacccagtgcgtggagaccttcgcccaccac

SEQ ID NO: 20203 - RNA, 252 nt, synthetic construct
  source 1..252: mol_type = other RNA
gtgacctacgacgacgtgcacatcgacttcacctgggaggagtggaccctgctggaccccagccagaagaacctgtacaaggacgtgatgctggagacctacaggaacctgaccaccgtgggctacagctgggaggaccacctgatcgaggagcactgcaagagcagcaggaagcacgagaggcacgagaggatccccaccggcgagcagcccagcgagagcacccagagcttcagggccttcgcccaccac

SEQ ID NO: 20204 - RNA, 246 nt, synthetic construct
  source 1..246: mol_type = other RNA
gtgaccttcgaggacgtggccgtgaacttcaccagcggcgagtgggccctgctggacagcagccagaagaagctgtacagggacgtgatgaaggagaccttcctgaacctgatcagcatcgagaagggcctggagcccaacatcgaggagcactacaaggacttctgcaggaacctgaggacccagctggtggagaaggactggggctacgagtacaacaggcagtgggacgacaacctgcagacc

SEQ ID NO: 20205 - RNA, 276 nt, synthetic construct
  source 1..276: mol_type = other RNA
gtgacctacgaggacgtgaccgtgaccttcacccaggaggagtgggccctgctgaaccccagcgagaagaagctgtacagggacgtgatgtgggagaacctgaggaacatcttcagcaccggcaagatccagggcgacaactacaacgaggagcagcacaaccaccagggcagcaagcagagctgcagggtggtgaagatcagcggcggccagaagaggagccagaacgacgagaagcagaggatgcagagcgagggcaagagctacgagtgcgag

SEQ ID NO: 20206 - RNA, 261 nt, synthetic construct
  source 1..261: mol_type = other RNA
gtggccttcgaggacgtggccgtgaacttcacccaggaggagtgggccctgctgaacagcagccagaagaacctgtacagggaggtgatgcaggagacctgcaggaacctggccagcgtgggcagcaagtggaaggaccagaacatcgaggaccacttcgagaagcccggcaagaacatcaggaagcacatggtgcagaagctgtgcgagagcaaggagggcagccagtacggcgaggtggtgagccagatccccaacctg

SEQ ID NO: 20207 - RNA, 261 nt, synthetic construct
  source 1..261: mol_type = other RNA
gtggccttcgaggacgtggccgtgaacttcacccaggaggagtgggccctgctggaccccagccagaagaacctgtacagggaggtgatgcaggagaccctgaggaacctggccagcatcggcaagaagtggaacaaccagtacatcgaggacgagcaccagaaccccaggaggaacctgaggaggctgatcaaggagaggctgagcgagagcaaggagagccaccagcacggcgagttcctgacccaggtgcccgacgac

SEQ ID NO: 20208 - RNA, 267 nt, synthetic construct
  source 1..267: mol_type = other RNA
gtggtgttcgaggacgtggccgtgaacttcaccctggaggagtgggccctgctggacagcagccagaaggagctgtacagggacgtgatgctggagaccttcaggaacctggccagcgtggacggcgagacccagtacaaggccaacggcagcgtgagccagcaggacatctacaggaacaagatcagcaaggagcacaagatcagcaagttcaccggcaacgacagctggcccttcgtgctgggcaagatctgggaggagctgagc

SEQ ID NO: 20209 - RNA, 342 nt, synthetic construct
  source 1..342: mol_type = other RNA
gtgaccttcgaggacatcgccgtgtacttcagcagggaggagtggggcctgctggacgaggcccagaggtgcctgtaccacgacgtgatgctggagaacttcagcctgatgaccagcgtgggctgcctgcacggcatcggcgccgaggaggcccccagcgagcagatcgtgagcgtggagaccgtgagccaggccaggacccccaagcccagcagcagcatccccaacgcccacagctgcgagatgtgcatcctggtgatgaaggacatcctgtacctgaccgagcaccagggcaccctgccctggcagaagccctacaccagcgccgccagcggcaagtgg

SEQ ID NO: 20210 - RNA, 252 nt, synthetic construct
  source 1..252: mol_type = other RNA
ctgaccttcgaggacgtggccgtgtacttcagcgaggaggagtggcagctgctggacccccccgagaagaccctgtacaacgacgtgatgcaggacatctacgagaccgtgatcagcctgggcctgaagctgaagaacgacaccggcaacgaccaccccatcagcgtgagcaccagcgagatccagaccagcggctgcaaggtgagcaagaagaccaggatgaagatcgcccagaagaccatgggcagggag

SEQ ID NO: 20211 - RNA, 249 nt, synthetic construct
  source 1..249: mol_type = other RNA
gtgaccttcaaggacgtggccgtgatcttcaccgaggaggagctgggcctgctggaccccgcccagaggaagctgtacagggacgtgatgctggagaacttcaggaacctgctgagcgtgggccaccagcccttccacggcgacaccttccacttcctgagggaggagaagttctgggtgatgggcaccaccagccagagggagggcaacctgggcggcaagatccagaccgagatggagaccgtgccc

SEQ ID NO: 20212 - RNA, 261 nt, synthetic construct
  source 1..261: mol_type = other RNA
gtgaccttcgaggacgtggccgtgaacttcagcctggaggagtgggccctgctggacctgagccagaagaagctgtacagggacgtgatgcaggagaccttcaggaacctggccagcgtgggcgagaagtgggacaaccacaacatcgaggactggaacaagacccagggcaggaagctgaggagccacatggtggagaagctgagcgagagcaaggagggcggccagcacggcgagaccgccagccagatccccaacctg

SEQ ID NO: 20213 - RNA, 252 nt, synthetic construct
  source 1..252: mol_type = other RNA
ctgaccttcgaggacgtggccgtgtacttcagcgaggaggagtggcagctgctgaaccccctggagaagaccctgtacaacgacgtgatgcaggacatctacgagaccgtgatcagcctgggcctgaagctgaagaacgacaccggcaacgaccaccccatcagcgtgagcaccagcgagatccagaccagcggctgcgaggtgagcaagaagaccaggatgaagatcgcccagaagaccatgggcagggag

SEQ ID NO: 20214 - RNA, 273 nt, synthetic construct
  source 1..273: mol_type = other RNA
gtgaccttcgaggacgtggccgtgaacttcaccccccaggagtgggccctgctggaccccagccagaagaacctgtacagggacgtgatgcaggagaccctgaggaacctggccagcgtgggcaagaagtggaaggaccagaacatggaggacgagtgcaagacccccaggaggaacctgaggagcgtggtgggcgagaggctgttcaccagcaaggagggcagccagtgcggcgagaccctgaacctggacagccaccacatgctgaagaag

SEQ ID NO: 20215 - RNA, 276 nt, synthetic construct
  source 1..276: mol_type = other RNA
gtggtgttcgaggacgtggccgtgtacttcagccaggaggagtggggcctgctggacgaggcccagaggcacctgtaccacgccgtgatgaccgagaacttcgccctggtgaccagcctgggctgctggcacggcgcccaggacgaggaggcccccagcgagcagagcatcagcgtgggcatgagcgaggtgggcacccccaagcccgaccccagcaccaagaagggccagccctacgagatgtgcgagcccctgagcaaggacctgctgcacctg

SEQ ID NO: 20216 - RNA, 279 nt, synthetic construct
  source 1..279: mol_type = other RNA
gtgagcttcgaggaggtggccgtgcacttcagcgaggaggagtggagccagctggaccccgcccagaaggccctgcacggcgaggtgatgctggagaacagcaggaacctggccagcctgggctacaacgagcacggcaacaagaactgcaaggagcagtgccagcccgtggaccccaacgagcagaacaggaacttcgccgaccagatgcagaccaagatcgacgagaccaaccagagccagagcgaggtggagaagaccttccacagcacccaccac

SEQ ID NO: 20217 - RNA, 291 nt, synthetic construct
  source 1..291: mol_type = other RNA
gagaagatcgaggacatggccgtgagcctgatcagggaggagtggctgctggaccccagccagaaggacctgaggagggacaacaggaccgagaactacaggaacatgttcagcctgggcggcgagaccaggagcgagaacagggagctggccagcaagcaggtggccagcgccggcgtgcagccccacggcgagaccgccgccaggtgcaacggcgacgtgaccggcgccctggagcacggcgaggccagggacctgctgggcagcagggtggagaggcagagggccaac

SEQ ID NO: 20218 - RNA, 240 nt, synthetic construct
  source 1..240: mol_type = other RNA
gccttcgaggacgtggccgtgtacttcagccaggaggagtggggcctgctggacaccgcccagagagccctgtacagaagagtgatgctggacaacttcgccctggtggccagcctgggcctgagcaccagcagacccagagtggtgatccagctggagagaggcgaggagccctgggtgcccagcggcaccgacaccaccctgagcagaaccacctacagaagaagaaaccccggcagc

SEQ ID NO: 20219 - RNA, 240 nt, synthetic construct
  source 1..240: mol_type = other RNA
agagagagcctggaggacgaggtgacccccggcctgcccaccgccgagagccaggagctgctgaccttcaaggacatcagcatcgacttcacccaggaggagtggggccagctggcccccgcccaccagaacctgtacagagaggtgatgctggagaactacagcaacctggtgagcgtgggctaccagctgagcaagcccagcgtgatcagccagctggagaagggcgaggagccctgg

SEQ ID NO: 20220 - RNA, 240 nt, synthetic construct
  source 1..240: mol_type = other RNA
gccctgagaagcgtgatgttcagcgacgtgagcatcgacttcagccccgaggagtgggagtacctggacctggagcagaaggacctgtacagagacgtgatgctggagaactacagcaacctggtgagcctgggctgcttcatcagcaagcccgacgtgatcagcagcctggagcagggcaaggagccctggaaggtggtgagaaagggcagaagacagtaccccgacctggagaccaag

SEQ ID NO: 20221 - RNA, 240 nt, synthetic construct
  source 1..240: mol_type = other RNA
gacagcgtggccttcgaggacgtggccgtgaacttcacccaggaggagtgggccctgctgagccccagccagaagaacctgtacagagacgtgaccctggagaccttcagaaacctggccagcgtgggcatccagtggaaggaccaggacatcgagaacctgtaccagaacctgggcatcaagctgagaagcctggtggagagactgtgcggcagaaaggagggcaacgagcacagagag

SEQ ID NO: 20222 - RNA, 240 nt, synthetic construct
  source 1..240: mol_type = other RNA
agccaggtgaccttcagcgacgtggccatcgacttcagccacgaggagtgggcctgcctggacagcgcccagagagacctgtacaaggacgtgatggtgcagaactacgagaacctggtgagcgtgggcctgagcgtgaccaagccctacgtgatcatgctgctggaggacggcaaggagccctggatgatggagaagaagctgagcaaggcctaccccttccccctgagccacagcgtg

SEQ ID NO: 20223 - RNA, 240 nt, synthetic construct
  source 1..240: mol_type = other RNA
ggcccccagggcgccagaagacaggccttcctggccttcggcgacgtgaccgtggacttcacccagaaggagtggagactgctgagccccgcccagagagccctgtacagagaggtgaccctggagaactacagccacctggtgagcctgggcatcctgcacagcaagcccgagctgatcagaagactggagcagggcgaggtgccctggggcgaggagagaagaagaagacccggcccc

SEQ ID NO: 20224 - RNA, 240 nt, synthetic construct
  source 1..240: mol_type = other RNA
aacgtggaggtggtgaaggtgatgccccaggacctggtgaccttcaaggacgtggccatcgacttcagccaggaggagtggcagtggatgaaccccgcccagaagagactgtacagaagcatgatgctggagaactaccagagcctggtgagcctgggcctgtgcatcagcaagccctacgtgatcagcctgctggagcagggcagagagccctgggagatgaccagcgagatgaccaga

SEQ ID NO: 20225 - RNA, 240 nt, synthetic construct
  source 1..240: mol_type = other RNA
gaggagacccagggcgagctgaccagcagctgcggcagcaagaccatggccaacgtgagcctggccttcagagacgtgagcatcgacctgagccaggaggagtgggagtgcctggacgccgtgcagagagacctgtacaaggacgtgatgctggagaactacagcaacctggtgagcctgggctacaccatccccaagcccgacgtgatcaccctgctggagcaggagaaggagccctgg

SEQ ID NO: 20226 - RNA, 240 nt, synthetic construct
  source 1..240: mol_type = other RNA
gacaccgtggtgttcgaggacgtggtggtggacttcaccctggaggagtgggccctgctgaaccccgcccagagaaagctgtacagagacgtgatgctggagaccttcaagcacctggccagcgtggacaacgaggcccagctgaaggccagcggcagcatcagccagcaggacaccagcggcgagaagctgagcctgaagcagaagatcgagaagttcaccagaaagaacatctgggcc

SEQ ID NO: 20227 - RNA, 240 nt, synthetic construct
  source 1..240: mol_type = other RNA
ggcagcctggaggagggcagaagagccaccggcctgcccgccgcccaggtgcaggagcccgtgaccttcaaggacgtggccgtggacttcacccaggaggagtggggccagctggacctggtgcagagaaccctgtacagagacgtgatgctggagacctacggccacctgctgagcgtgggcaaccagatcgccaagcccgaggtgatcagcctgctggagcagggcgaggagccctgg

SEQ ID NO: 20228 - RNA, 240 nt, synthetic construct
  source 1..240: mol_type = other RNA
acccagcccgacgaggacctgcacctgcaggccgaggagacccagctggtgaaggagagcgtgaccttcaaggacgtggccatcgacttcaccctggaggagtggagactgatggaccccacccagagaaacctgcacaaggacgtgatgctggagaactacagaaacctggtgagcctgggcctggccgtgagcaagcccgacatgatcagccacctggagaacggcaagggcccctgg

SEQ ID NO: 20229 - RNA, 240 nt, synthetic construct
  source 1..240: mol_type = other RNA
aacatgagccaggccagcgtgagcttccaggacgtgaccgtggagttcaccagagaggagtggcagcacctgggccccgtggagagaaccctgtacagagacgtgatgctggagaactacagccacctgatcagcgtgggctactgcatcaccaagcccaaggtgatcagcaagctggagaagggcgaggagccctggagcctggaggacgagttcctgaaccagagataccccggctac

SEQ ID NO: 20230 - RNA, 240 nt, synthetic construct
  source 1..240: mol_type = other RNA
gagcccctgaagttcagagacgtggccatcgagttcagcctggaggagtggcagtgcctggacaccatccagcagaacctgtacagaaacgtgatgctggagaactacagaaacctggtgttcctgggcatcgtggtgagcaagcccgacctgatcacctgcctggagcaggagaaggagccctggaccagaaagagacacagaatggtggccgagccccccgtgatctgcagccacttc

SEQ ID NO: 20231 - RNA, 240 nt, synthetic construct
  source 1..240: mol_type = other RNA
agagtgctgaccttcagagacgtggccgtggagttcagccccgaggagtgggagtgcctggacagcgcccagcagagactgtacagagacgtgatgctggagaactacggcaacctgttcagcctgggcctggccatcttcaagcccgacctgatcacctacctggagcagagaaaggagccctggaacgccagaagacagaagaccgtggccaagcaccccgccggcagcctgcacttc

SEQ ID NO: 20232 - RNA, 240 nt, synthetic construct
  source 1..240: mol_type = other RNA
aacatggagggcctggtgatgttccaggacctgagcatcgacttcagccaggaggagtgggagtgcctggacgccgcccagaaggacctgtacagagacgtgatgatggagaactacagcagcctggtgagcctgggcctgagcatccccaagcccgacgtgatcagcctgctggagcagggcaaggagccctggatggtgagcagagacgtgctgggcggctggtgcagagacagcgag

SEQ ID NO: 20233 - RNA, 240 nt, synthetic construct
  source 1..240: mol_type = other RNA
caggaccccagcgccgagggcctgagcgaggaggtgcccgtggtgttcgaggagctgcccgtggtgttcgaggacgtggccgtgtacttcaccagagaggagtggggcatgctggacaagagacagaaggagctgtacagagacgtgatgagaatgaactacgagctgctggccagcctgggccccgccgccgccaagcccgacctgatcagcaagctggagagaagagccgccccctgg

SEQ ID NO: 20234 - RNA, 243 nt, synthetic construct; identical to SEQ ID NO: 18637
  modified_base 1..243: mod_base = OTHER; note = Each t is m1f
  source 1..243: mol_type = other RNA

SEQ ID NO: 20235 - RNA, 243 nt, synthetic construct; identical to SEQ ID NO: 18638
  modified_base 1..243: mod_base = OTHER; note = Each t is m1f
  source 1..243: mol_type = other RNA

SEQ ID NO: 20236 - RNA, 243 nt, synthetic construct; identical to SEQ ID NO: 18639
  modified_base 1..243: mod_base = OTHER; note = Each t is m1f
  source 1..243: mol_type = other RNA

SEQ ID NO: 20237 - RNA, 243 nt, synthetic construct; identical to SEQ ID NO: 18640
  modified_base 1..243: mod_base = OTHER; note = Each t is m1f
  source 1..243: mol_type = other RNA

SEQ ID NO: 20238 - RNA, 243 nt, synthetic construct; identical to SEQ ID NO: 18641
  modified_base 1..243: mod_base = OTHER; note = Each t is m1f
  source 1..243: mol_type = other RNA

SEQ ID NO: 20239 - RNA, 243 nt, synthetic construct; identical to SEQ ID NO: 18642
  modified_base 1..243: mod_base = OTHER; note = Each t is m1f
  source 1..243: mol_type = other RNA

SEQ ID NO: 20240 - RNA, 243 nt, synthetic construct; identical to SEQ ID NO: 18643
  modified_base 1..243: mod_base = OTHER; note = Each t is m1f
  source 1..243: mol_type = other RNA

SEQ ID NO: 20241 - RNA, 252 nt, synthetic construct; identical to SEQ ID NO: 18644
  modified_base 1..252: mod_base = OTHER; note = Each t is m1f
  source 1..252: mol_type = other RNA

SEQ ID NO: 20242 - RNA, 270 nt, synthetic construct; identical to SEQ ID NO: 18645
  modified_base 1..270: mod_base = OTHER; note = Each t is m1f
  source 1..270: mol_type = other RNA

SEQ ID NO: 20243 - RNA, 243 nt, synthetic construct; identical to SEQ ID NO: 18646
  modified_base 1..243: mod_base = OTHER; note = Each t is m1f
  source 1..243: mol_type = other RNA

SEQ ID NO: 20244 - RNA, 243 nt, synthetic construct; identical to SEQ ID NO: 18647
  modified_base 1..243: mod_base = OTHER; note = Each t is m1f
  source 1..243: mol_type = other RNA

SEQ ID NO: 20245 - RNA, 243 nt, synthetic construct; identical to SEQ ID NO: 18648
  modified_base 1..243: mod_base = OTHER; note = Each t is m1f
  source 1..243: mol_type = other RNA

SEQ ID NO: 20246 - RNA, 243 nt, synthetic construct; identical to SEQ ID NO: 18649
  modified_base 1..243: mod_base = OTHER; note = Each t is m1f
  source 1..243: mol_type = other RNA

SEQ ID NO: 20247 - RNA, 243 nt, synthetic construct; identical to SEQ ID NO: 18650
  modified_base 1..243: mod_base = OTHER; note = Each t is m1f
  source 1..243: mol_type = other RNA

SEQ ID NO: 20248 - RNA, 243 nt, synthetic construct; identical to SEQ ID NO: 18651
  modified_base 1..243: mod_base = OTHER; note = Each t is m1f
  source 1..243: mol_type = other RNA

SEQ ID NO: 20249 - RNA, 243 nt, synthetic construct; identical to SEQ ID NO: 18652
  modified_base 1..243: mod_base = OTHER; note = Each t is m1f
  source 1..243: mol_type = other RNA

SEQ ID NO: 20250 - RNA, 243 nt, synthetic construct; identical to SEQ ID NO: 18653
  modified_base 1..243: mod_base = OTHER; note = Each t is m1f
  source 1..243: mol_type = other RNA

SEQ ID NO: 20251 - RNA, 243 nt, synthetic construct; identical to SEQ ID NO: 18654
  modified_base 1..243: mod_base = OTHER; note = Each t is m1f
  source 1..243: mol_type = other RNA

SEQ ID NO: 20252 - RNA, 243 nt, synthetic construct; identical to SEQ ID NO: 18655
  modified_base 1..243: mod_base = OTHER; note = Each t is m1f
  source 1..243: mol_type = other RNA

SEQ ID NO: 20253 - RNA, 243 nt, synthetic construct; identical to SEQ ID NO: 18656
  modified_base 1..243: mod_base = OTHER; note = Each t is m1f
  source 1..243: mol_type = other RNA

SEQ ID NO: 20254 - RNA, 243 nt, synthetic construct; identical to SEQ ID NO: 18657
  modified_base 1..243: mod_base = OTHER; note = Each t is m1f
  source 1..243: mol_type = other RNA

SEQ ID NO: 20255 - RNA, 243 nt, synthetic construct; identical to SEQ ID NO: 18658
  modified_base 1..243: mod_base = OTHER; note = Each t is m1f
  source 1..243: mol_type = other RNA

SEQ ID NO: 20256 - RNA, 243 nt, synthetic construct; identical to SEQ ID NO: 18659
  modified_base 1..243: mod_base = OTHER; note = Each t is m1f
  source 1..243: mol_type = other RNA

SEQ ID NO: 20257 - RNA, 243 nt, synthetic construct; identical to SEQ ID NO: 18660
  modified_base 1..243: mod_base = OTHER; note = Each t is m1f
  source 1..243: mol_type = other RNA

SEQ ID NO: 20258 - RNA, 243 nt, synthetic construct; identical to SEQ ID NO: 18661
  modified_base 1..243: mod_base = OTHER; note = Each t is m1f
  source 1..243: mol_type = other RNA

SEQ ID NO: 20259 - RNA, 243 nt, synthetic construct; identical to SEQ ID NO: 18662
  modified_base 1..243: mod_base = OTHER; note = Each t is m1f
  source 1..243: mol_type = other RNA

SEQ ID NO: 20260 - RNA, 243 nt, synthetic construct; identical to SEQ ID NO: 18663
  modified_base 1..243: mod_base = OTHER; note = Each t is m1f
  source 1..243: mol_type = other RNA

SEQ ID NO: 20261 - RNA, 243 nt, synthetic construct; identical to SEQ ID NO: 18664
  modified_base 1..243: mod_base = OTHER; note = Each t is m1f
  source 1..243: mol_type = other RNA

SEQ ID NO: 20262 - RNA, 243 nt, synthetic construct; identical to SEQ ID NO: 18665
  modified_base 1..243: mod_base = OTHER; note = Each t is m1f
  source 1..243: mol_type = other RNA

SEQ ID NO: 20263 - RNA, 243 nt, synthetic construct; identical to SEQ ID NO: 18666
  modified_base 1..243: mod_base = OTHER; note = Each t is m1f
  source 1..243: mol_type = other RNA

SEQ ID NO: 20264 - RNA, 243 nt, synthetic construct; identical to SEQ ID NO: 18667
  modified_base 1..243: mod_base = OTHER; note = Each t is m1f
  source 1..243: mol_type = other RNA

SEQ ID NO: 20265 - RNA, 243 nt, synthetic construct; identical to SEQ ID NO: 18668
  modified_base 1..243: mod_base = OTHER; note = Each t is m1f
  source 1..243: mol_type = other RNA

SEQ ID NO: 20266 - RNA, 243 nt, synthetic construct; identical to SEQ ID NO: 18669
  modified_base 1..243: mod_base = OTHER; note = Each t is m1f
  source 1..243: mol_type = other RNA

SEQ ID NO: 20267 - RNA, 243 nt, synthetic construct; identical to SEQ ID NO: 18670
  modified_base 1..243: mod_base = OTHER; note = Each t is m1f
  source 1..243: mol_type = other RNA

SEQ ID NO: 20268 - RNA, 243 nt, synthetic construct; identical to SEQ ID NO: 18671
  modified_base 1..243: mod_base = OTHER; note = Each t is m1f
  source 1..243: mol_type = other RNA

SEQ ID NO: 20269 - RNA, 243 nt, synthetic construct; identical to SEQ ID NO: 18672
  modified_base 1..243: mod_base = OTHER; note = Each t is m1f
  source 1..243: mol_type = other RNA

SEQ ID NO: 20270 - RNA, 243 nt, synthetic construct; identical to SEQ ID NO: 18673
  modified_base 1..243: mod_base = OTHER; note = Each t is m1f
  source 1..243: mol_type = other RNA

SEQ ID NO: 20271 - RNA, 243 nt, synthetic construct; identical to SEQ ID NO: 18674
  modified_base 1..243: mod_base = OTHER; note = Each t is m1f
  source 1..243: mol_type = other RNA

SEQ ID NO: 20272 - RNA, 243 nt, synthetic construct; identical to SEQ ID NO: 18675
  modified_base 1..243: mod_base = OTHER; note = Each t is m1f
  source 1..243: mol_type = other RNA

SEQ ID NO: 20273 - RNA, 243 nt, synthetic construct; identical to SEQ ID NO: 18676
  modified_base 1..243: mod_base = OTHER; note = Each t is m1f
  source 1..243: mol_type = other RNA

SEQ ID NO: 20274 - RNA, 243 nt, synthetic construct; identical to SEQ ID NO: 18677
  modified_base 1..243: mod_base = OTHER; note = Each t is m1f
  source 1..243: mol_type = other RNA

SEQ ID NO: 20275 - RNA, 243 nt, synthetic construct; identical to SEQ ID NO: 18678
  modified_base 1..243: mod_base = OTHER; note = Each t is m1f
  source 1..243: mol_type = other RNA

SEQ ID NO: 20276 - RNA, 243 nt, synthetic construct; identical to SEQ ID NO: 18679
  modified_base 1..243: mod_base = OTHER; note = Each t is m1f
  source 1..243: mol_type = other RNA

SEQ ID NO: 20277 - RNA, 243 nt, synthetic construct; identical to SEQ ID NO: 18680
  modified_base 1..243: mod_base = OTHER; note = Each t is m1f
  source 1..243: mol_type = other RNA

SEQ ID NO: 20278 - RNA, 243 nt, synthetic construct; identical to SEQ ID NO: 18681
  modified_base 1..243: mod_base = OTHER; note = Each t is m1f
  source 1..243: mol_type = other RNA

SEQ ID NO: 20279 - RNA, 243 nt, synthetic construct; identical to SEQ ID NO: 18682
  modified_base 1..243: mod_base = OTHER; note = Each t is m1f
  source 1..243: mol_type = other RNA

SEQ ID NO: 20280 - RNA, 243 nt, synthetic construct; identical to SEQ ID NO: 18683
  modified_base 1..243: mod_base = OTHER; note = Each t is m1f
  source 1..243: mol_type = other RNA

SEQ ID NO: 20281 - RNA, 243 nt, synthetic construct; identical to SEQ ID NO: 18684
  modified_base 1..243: mod_base = OTHER; note = Each t is m1f
  source 1..243: mol_type = other RNA

SEQ ID NO: 20282 - RNA, 243 nt, synthetic construct; identical to SEQ ID NO: 18685
  modified_base 1..243: mod_base = OTHER; note = Each t is m1f
  source 1..243: mol_type = other RNA

SEQ ID NO: 20283 - RNA, 243 nt, synthetic construct; identical to SEQ ID NO: 18686
  modified_base 1..243: mod_base = OTHER; note = Each t is m1f
  source 1..243: mol_type = other RNA

SEQ ID NO: 20284 - RNA, 243 nt, synthetic construct; identical to SEQ ID NO: 18687
  modified_base 1..243: mod_base = OTHER; note = Each t is m1f
  source 1..243: mol_type = other RNA

SEQ ID NO: 20285 - RNA, 243 nt, synthetic construct; identical to SEQ ID NO: 18688
  modified_base 1..243: mod_base = OTHER; note = Each t is m1f
  source 1..243: mol_type = other RNA

SEQ ID NO: 20286 - RNA, 243 nt, synthetic construct; identical to SEQ ID NO: 18689
  modified_base 1..243: mod_base = OTHER; note = Each t is m1f
  source 1..243: mol_type = other RNA

SEQ ID NO: 20287 - RNA, 243 nt, synthetic construct; identical to SEQ ID NO: 18690
  modified_base 1..243: mod_base = OTHER; note = Each t is m1f
  source 1..243: mol_type = other RNA

SEQ ID NO: 20288 - RNA, 243 nt, synthetic construct; identical to SEQ ID NO: 18691
  modified_base 1..243: mod_base = OTHER; note = Each t is m1f
  source 1..243: mol_type = other RNA

SEQ ID NO: 20289 - RNA, 243 nt, synthetic construct; identical to SEQ ID NO: 18692
  modified_base 1..243: mod_base = OTHER; note = Each t is m1f
  source 1..243: mol_type = other RNA

SEQ ID NO: 20290 - RNA, 243 nt, synthetic construct; identical to SEQ ID NO: 18693
  modified_base 1..243: mod_base = OTHER; note = Each t is m1f
  source 1..243: mol_type = other RNA

SEQ ID NO: 20291 - RNA, 243 nt, synthetic construct; identical to SEQ ID NO: 18694
  modified_base 1..243: mod_base = OTHER; note = Each t is m1f
  source 1..243: mol_type = other RNA

SEQ ID NO: 20292 - RNA, 243 nt, synthetic construct; identical to SEQ ID NO: 18695
  modified_base 1..243: mod_base = OTHER; note = Each t is m1f
  source 1..243: mol_type = other RNA

SEQ ID NO: 20293 - RNA, 243 nt, synthetic construct; identical to SEQ ID NO: 18696
  modified_base 1..243: mod_base = OTHER; note = Each t is m1f
  source 1..243: mol_type = other RNA

SEQ ID NO: 20294 - RNA, 243 nt, synthetic construct; identical to SEQ ID NO: 18697
  modified_base 1..243: mod_base = OTHER; note = Each t is m1f
  source 1..243: mol_type = other RNA

SEQ ID NO: 20295 - RNA, 243 nt, synthetic construct; identical to SEQ ID NO: 18698
  modified_base 1..243: mod_base = OTHER; note = Each t is m1f
  source 1..243: mol_type = other RNA

SEQ ID NO: 20296 - RNA, 243 nt, synthetic construct; identical to SEQ ID NO: 18699
  modified_base 1..243: mod_base = OTHER; note = Each t is m1f
  source 1..243: mol_type = other RNA

SEQ ID NO: 20297 - RNA, 243 nt, synthetic construct; identical to SEQ ID NO: 18700
  modified_base 1..243: mod_base = OTHER; note = Each t is m1f
  source 1..243: mol_type = other RNA

SEQ ID NO: 20298 - RNA, 243 nt, synthetic construct; identical to SEQ ID NO: 18701
  modified_base 1..243: mod_base = OTHER; note = Each t is m1f
  source 1..243: mol_type = other RNA

SEQ ID NO: 20299 - RNA, 243 nt, synthetic construct; identical to SEQ ID NO: 18702
  modified_base 1..243: mod_base = OTHER; note = Each t is m1f
  source 1..243: mol_type = other RNA

SEQ ID NO: 20300 - RNA, 243 nt, synthetic construct; identical to SEQ ID NO: 18703
  modified_base 1..243: mod_base = OTHER; note = Each t is m1f
  source 1..243: mol_type = other RNA

SEQ ID NO: 20301 - RNA, 243 nt, synthetic construct; identical to SEQ ID NO: 18704
  modified_base 1..243: mod_base = OTHER; note = Each t is m1f
  source 1..243: mol_type = other RNA

SEQ ID NO: 20302 - RNA, 243 nt, synthetic construct; identical to SEQ ID NO: 18705
  modified_base 1..243: mod_base = OTHER; note = Each t is m1f
  source 1..243: mol_type = other RNA

SEQ ID NO: 20303 - RNA, 243 nt, synthetic construct; identical to SEQ ID NO: 18706
  modified_base 1..243: mod_base = OTHER; note = Each t is m1f
  source 1..243: mol_type = other RNA

SEQ ID NO: 20304 - RNA, 243 nt, synthetic construct; identical to SEQ ID NO: 18707
  modified_base 1..243: mod_base = OTHER; note = Each t is m1f
  source 1..243: mol_type = other RNA

SEQ ID NO: 20305 - RNA, 243 nt, synthetic construct; identical to SEQ ID NO: 18708
  modified_base 1..243: mod_base = OTHER; note = Each t is m1f
  source 1..243: mol_type = other RNA

SEQ ID NO: 20306 - RNA, 243 nt, synthetic construct; identical to SEQ ID NO: 18709
  modified_base 1..243: mod_base = OTHER; note = Each t is m1f
  source 1..243: mol_type = other RNA

SEQ ID NO: 20307 - RNA, 243 nt, synthetic construct; identical to SEQ ID NO: 18710
  modified_base 1..243: mod_base = OTHER; note = Each t is m1f
  source 1..243: mol_type = other RNA

SEQ ID NO: 20308 - RNA, 243 nt, synthetic construct; identical to SEQ ID NO: 18711
  modified_base 1..243: mod_base = OTHER; note = Each t is m1f
  source 1..243: mol_type = other RNA

SEQ ID NO: 20309 - RNA, 243 nt, synthetic construct; identical to SEQ ID NO: 18712
  modified_base 1..243: mod_base = OTHER; note = Each t is m1f
  source 1..243: mol_type = other RNA

SEQ ID NO: 20310 - RNA, 240 nt, synthetic construct; identical to SEQ ID NO: 18713
  modified_base 1..240: mod_base = OTHER; note = Each t is m1f
  source 1..240: mol_type = other RNA

SEQ ID NO: 20311 - RNA, 243 nt, synthetic construct; identical to SEQ ID NO: 18714
  modified_base 1..243: mod_base = OTHER; note = Each t is m1f
  source 1..243: mol_type = other RNA

SEQ ID NO: 20312 - RNA, 243 nt, synthetic construct; identical to SEQ ID NO: 18715
  modified_base 1..243: mod_base = OTHER; note = Each t is m1f
  source 1..243: mol_type = other RNA

SEQ ID NO: 20313 - RNA, 243 nt, synthetic construct; identical to SEQ ID NO: 18716
  modified_base 1..243: mod_base = OTHER; note = Each t is m1f
  source 1..243: mol_type = other RNA

SEQ ID NO: 20314 - RNA, 243 nt, synthetic construct; identical to SEQ ID NO: 18717
  modified_base 1..243: mod_base = OTHER; note = Each t is m1f
  source 1..243: mol_type = other RNA

SEQ ID NO: 20315 - RNA, 240 nt, synthetic construct; identical to SEQ ID NO: 18718
  modified_base 1..240: mod_base = OTHER; note = Each t is m1f
  source 1..240: mol_type = other RNA

SEQ ID NO: 20316 - RNA, 243 nt, synthetic construct; identical to SEQ ID NO: 18719
  modified_base 1..243: mod_base = OTHER; note = Each t is m1f
  source 1..243: mol_type = other RNA

SEQ ID NO: 20317 - RNA, 243 nt, synthetic construct; identical to SEQ ID NO: 18720
  modified_base 1..243: mod_base = OTHER; note = Each t is m1f
  source 1..243: mol_type = other RNA

SEQ ID NO: 20318 - RNA, 243 nt, synthetic construct; identical to SEQ ID NO: 18721
  modified_base 1..243: mod_base = OTHER; note = Each t is m1f
  source 1..243: mol_type = other RNA

SEQ ID NO: 20319 - RNA, 243 nt, synthetic construct; identical to SEQ ID NO: 18722
  modified_base 1..243: mod_base = OTHER; note = Each t is m1f
  source 1..243: mol_type = other RNA

SEQ ID NO: 20320 - RNA, 243 nt, synthetic construct; identical to SEQ ID NO: 18723
  modified_base 1..243: mod_base = OTHER; note = Each t is m1f
  source 1..243: mol_type = other RNA

SEQ ID NO: 20321 - RNA, 243 nt, synthetic construct; identical to SEQ ID NO: 18724
  modified_base 1..243: mod_base = OTHER; note = Each t is m1f
  source 1..243: mol_type = other RNA

SEQ ID NO: 20322 - RNA, 243 nt, synthetic construct; identical to SEQ ID NO: 18725
  modified_base 1..243: mod_base = OTHER; note = Each t is m1f
  source 1..243: mol_type = other RNA

SEQ ID NO: 20323 - RNA, 243 nt, synthetic construct; identical to SEQ ID NO: 18726
  modified_base 1..243: mod_base = OTHER; note = Each t is m1f
  source 1..243: mol_type = other RNA

SEQ ID NO: 20324 - RNA, 243 nt, synthetic construct; identical to SEQ ID NO: 18727
  modified_base 1..243: mod_base = OTHER; note = Each t is m1f
  source 1..243: mol_type = other RNA

SEQ ID NO: 20325 - RNA, 243 nt, synthetic construct; identical to SEQ ID NO: 18728
  modified_base 1..243: mod_base = OTHER; note = Each t is m1f
  source 1..243: mol_type = other RNA

SEQ ID NO: 20326 - RNA, 243 nt, synthetic construct; identical to SEQ ID NO: 18729
  modified_base 1..243: mod_base = OTHER; note = Each t is m1f
  source 1..243: mol_type = other RNA

SEQ ID NO: 20327 - RNA, 261 nt, synthetic construct; identical to SEQ ID NO: 18730
  modified_base 1..261: mod_base = OTHER; note = Each t is m1f
  source 1..261: mol_type = other RNA

SEQ ID NO: 20328 - RNA, 279 nt, synthetic construct; identical to SEQ ID NO: 18731
  modified_base 1..279: mod_base = OTHER; note = Each t is m1f
  source 1..279: mol_type = other RNA

SEQ ID NO: 20329 - RNA, 243 nt, synthetic construct; identical to SEQ ID NO: 18732
  modified_base 1..243: mod_base = OTHER; note = Each t is m1f
  source 1..243: mol_type = other RNA

SEQ ID NO: 20330 - RNA, 243 nt, synthetic construct; identical to SEQ ID NO: 18733
  modified_base 1..243: mod_base = OTHER; note = Each t is m1f
  source 1..243: mol_type = other RNA

SEQ ID NO: 20331 - RNA, 243 nt, synthetic construct; identical to SEQ ID NO: 18734
  modified_base 1..243: mod_base = OTHER; note = Each t is m1f
  source 1..243: mol_type = other RNA

SEQ ID NO: 20332 - RNA, 243 nt, synthetic construct; identical to SEQ ID NO: 18735
  modified_base 1..243: mod_base = OTHER; note = Each t is m1f
  source 1..243: mol_type = other RNA

SEQ ID NO: 20333 - RNA, 243 nt, synthetic construct; identical to SEQ ID NO: 18736
  modified_base 1..243: mod_base = OTHER; note = Each t is m1f
  source 1..243: mol_type = other RNA

SEQ ID NO: 20334 - RNA, 243 nt, synthetic construct; identical to SEQ ID NO: 18737
  modified_base 1..243: mod_base = OTHER; note = Each t is m1f
  source 1..243: mol_type = other RNA

SEQ ID NO: 20335 - RNA, 243 nt, synthetic construct; identical to SEQ ID NO: 18738
  modified_base 1..243: mod_base = OTHER; note = Each t is m1f
  source 1..243: mol_type = other RNA

SEQ ID NO: 20336 - RNA, 243 nt, synthetic construct; identical to SEQ ID NO: 18739
  modified_base 1..243: mod_base = OTHER; note = Each t is m1f
  source 1..243: mol_type = other RNA

SEQ ID NO: 20337 - RNA, 243 nt, synthetic construct; identical to SEQ ID NO: 18740
  modified_base 1..243: mod_base = OTHER; note = Each t is m1f
  source 1..243: mol_type = other RNA

SEQ ID NO: 20338 - RNA, 243 nt, synthetic construct; identical to SEQ ID NO: 18741
  modified_base 1..243: mod_base = OTHER; note = Each t is m1f
  source 1..243: mol_type = other RNA

SEQ ID NO: 20339 - RNA, 243 nt, synthetic construct; identical to SEQ ID NO: 18742
  modified_base 1..243: mod_base = OTHER; note = Each t is m1f
  source 1..243: mol_type = other RNA

SEQ ID NO: 20340 - RNA, 243 nt, synthetic construct; identical to SEQ ID NO: 18743
  modified_base 1..243: mod_base = OTHER; note = Each t is m1f
  source 1..243: mol_type = other RNA

SEQ ID NO: 20341 - RNA, 243 nt, synthetic construct; identical to SEQ ID NO: 18744
  modified_base 1..243: mod_base = OTHER; note = Each t is m1f
  source 1..243: mol_type = other RNA

SEQ ID NO: 20342 - RNA, 243 nt, synthetic construct; identical to SEQ ID NO: 18745
  modified_base 1..243: mod_base = OTHER; note = Each t is m1f
  source 1..243: mol_type = other RNA

SEQ ID NO: 20343 - RNA, 243 nt, synthetic construct; identical to SEQ ID NO: 18746
  modified_base 1..243: mod_base = OTHER; note = Each t is m1f
  source 1..243: mol_type = other RNA

SEQ ID NO: 20344 - RNA, 243 nt, synthetic construct; identical to SEQ ID NO: 18747
  modified_base 1..243: mod_base = OTHER; note = Each t is m1f
  source 1..243: mol_type = other RNA

SEQ ID NO: 20345 - RNA, 243 nt, synthetic construct; identical to SEQ ID NO: 18748
  modified_base 1..243: mod_base = OTHER; note = Each t is m1f
  source 1..243: mol_type = other RNA

SEQ ID NO: 20346 - RNA, 243 nt, synthetic construct; identical to SEQ ID NO: 18749
  modified_base 1..243: mod_base = OTHER; note = Each t is m1f
  source 1..243: mol_type = other RNA

SEQ ID NO: 20347 - RNA, 243 nt, synthetic construct; identical to SEQ ID NO: 18750
  modified_base 1..243: mod_base = OTHER; note = Each t is m1f
  source 1..243: mol_type = other RNA

SEQ ID NO: 20348 - RNA, 243 nt, synthetic construct; identical to SEQ ID NO: 18751
  modified_base 1..243: mod_base = OTHER; note = Each t is m1f
  source 1..243: mol_type = other RNA

SEQ ID NO: 20349 - RNA, 243 nt, synthetic construct; identical to SEQ ID NO: 18752
  modified_base 1..243: mod_base = OTHER; note = Each t is m1f
  source 1..243: mol_type = other RNA

SEQ ID NO: 20350 - RNA, 243 nt, synthetic construct; identical to SEQ ID NO: 18753
  modified_base 1..243: mod_base = OTHER; note = Each t is m1f
  source 1..243: mol_type = other RNA

SEQ ID NO: 20351 - RNA, 243 nt, synthetic construct; identical to SEQ ID NO: 18754
  modified_base 1..243: mod_base = OTHER; note = Each t is m1f
  source 1..243: mol_type = other RNA

SEQ ID NO: 20352 - RNA, 243 nt, synthetic construct; identical to SEQ ID NO: 18755
  modified_base 1..243: mod_base = OTHER; note = Each t is m1f
  source 1..243: mol_type = other RNA

SEQ ID NO: 20353 - RNA, 243 nt, synthetic construct; identical to SEQ ID NO: 18756
  modified_base 1..243: mod_base = OTHER; note = Each t is m1f
  source 1..243: mol_type = other RNA

SEQ ID NO: 20354 - RNA, 243 nt, synthetic construct; identical to SEQ ID NO: 18757
  modified_base 1..243: mod_base = OTHER; note = Each t is m1f
  source 1..243: mol_type = other RNA

SEQ ID NO: 20355 - RNA, 243 nt, synthetic construct; identical to SEQ ID NO: 18758
  modified_base 1..243: mod_base = OTHER; note = Each t is m1f
  source 1..243: mol_type = other RNA

SEQ ID NO: 20356 - RNA, 243 nt, synthetic construct; identical to SEQ ID NO: 18759
  modified_base 1..243: mod_base = OTHER; note = Each t is m1f
  source 1..243: mol_type = other RNA

SEQ ID NO: 20357 - RNA, 243 nt, synthetic construct; identical to SEQ ID NO: 18760
  modified_base 1..243: mod_base = OTHER; note = Each t is m1f
  source 1..243: mol_type = other RNA

SEQ ID NO: 20358 - RNA, 243 nt, synthetic construct; identical to SEQ ID NO: 18761
  modified_base 1..243: mod_base = OTHER; note = Each t is m1f
  source 1..243: mol_type = other RNA

SEQ ID NO: 20359 - RNA, 243 nt, synthetic construct; identical to SEQ ID NO: 18762
  modified_base 1..243: mod_base = OTHER; note = Each t is m1f
  source 1..243: mol_type = other RNA

SEQ ID NO: 20360 - RNA, 243 nt, synthetic construct; identical to SEQ ID NO: 18763
  modified_base 1..243: mod_base = OTHER; note = Each t is m1f
  source 1..243: mol_type = other RNA

SEQ ID NO: 20361 - RNA, 243 nt, synthetic construct; identical to SEQ ID NO: 18764
  modified_base 1..243: mod_base = OTHER; note = Each t is m1f
  source 1..243: mol_type = other RNA

SEQ ID NO: 20362 - RNA, 243 nt, synthetic construct; identical to SEQ ID NO: 18765
  modified_base 1..243: mod_base = OTHER; note = Each t is m1f
  source 1..243: mol_type = other RNA

SEQ ID NO: 20363 - RNA, 243 nt, synthetic construct; identical to SEQ ID NO: 18766
  modified_base 1..243: mod_base = OTHER; note = Each t is m1f
  source 1..243: mol_type = other RNA

SEQ ID NO: 20364 - RNA, 243 nt, synthetic construct; identical to SEQ ID NO: 18767
  modified_base 1..243: mod_base = OTHER; note = Each t is m1f
  source 1..243: mol_type = other RNA

SEQ ID NO: 20365 - RNA, 243 nt, synthetic construct; identical to SEQ ID NO: 18768
  modified_base 1..243: mod_base = OTHER; note = Each t is m1f
  source 1..243: mol_type = other RNA

SEQ ID NO: 20366 - RNA, 243 nt, synthetic construct; identical to SEQ ID NO: 18769
  modified_base 1..243: mod_base = OTHER; note = Each t is m1f
  source 1..243: mol_type = other RNA

SEQ ID NO: 20367 - RNA, 243 nt, synthetic construct; identical to SEQ ID NO: 18770
  modified_base 1..243: mod_base = OTHER; note = Each t is m1f
  source 1..243: mol_type = other RNA

SEQ ID NO: 20368 - RNA, 243 nt, synthetic construct; identical to SEQ ID NO: 18771
  modified_base 1..243: mod_base = OTHER; note = Each t is m1f
  source 1..243: mol_type = other RNA

SEQ ID NO: 20369 - RNA, 243 nt, synthetic construct; identical to SEQ ID NO: 18772
  modified_base 1..243: mod_base = OTHER; note = Each t is m1f
  source 1..243: mol_type = other RNA

SEQ ID NO: 20370 - RNA, 243 nt, synthetic construct; identical to SEQ ID NO: 18773
  modified_base 1..243: mod_base = OTHER; note = Each t is m1f
  source 1..243: mol_type = other RNA

SEQ ID NO: 20371 - RNA, 243 nt, synthetic construct; identical to SEQ ID NO: 18774
  modified_base 1..243: mod_base = OTHER; note = Each t is m1f
  source 1..243: mol_type = other RNA

SEQ ID NO: 20372 - RNA, 243 nt, synthetic construct; identical to SEQ ID NO: 18775
  modified_base 1..243: mod_base = OTHER; note = Each t is m1f
  source 1..243: mol_type = other RNA

SEQ ID NO: 20373 - RNA, 243 nt, synthetic construct; identical to SEQ ID NO: 18776
  modified_base 1..243: mod_base = OTHER; note = Each t is m1f
  source 1..243: mol_type = other RNA

SEQ ID NO: 20374 - RNA, 243 nt, synthetic construct; identical to SEQ ID NO: 18777
  modified_base 1..243: mod_base = OTHER; note = Each t is m1f
  source 1..243: mol_type = other RNA

SEQ ID NO: 20375 - RNA, 243 nt, synthetic construct; identical to SEQ ID NO: 18778
  modified_base 1..243: mod_base = OTHER; note = Each t is m1f
  source 1..243: mol_type = other RNA

SEQ ID NO: 20376 - RNA, 243 nt, synthetic construct; identical to SEQ ID NO: 18779
  modified_base 1..243: mod_base = OTHER; note = Each t is m1f
  source 1..243: mol_type = other RNA

SEQ ID NO: 20377 - RNA, 243 nt, synthetic construct; identical to SEQ ID NO: 18780
  modified_base 1..243: mod_base = OTHER; note = Each t is m1f
  source 1..243: mol_type = other RNA

SEQ ID NO: 20378 - RNA, 243 nt, synthetic construct; identical to SEQ ID NO: 18781
  modified_base 1..243: mod_base = OTHER; note = Each t is m1f
  source 1..243: mol_type = other RNA

SEQ ID NO: 20379 - RNA, 243 nt, synthetic construct; identical to SEQ ID NO: 18782
  modified_base 1..243: mod_base = OTHER; note = Each t is m1f
  source 1..243: mol_type = other RNA

SEQ ID NO: 20380 - RNA, 243 nt, synthetic construct; identical to SEQ ID NO: 18783
  modified_base 1..243: mod_base = OTHER; note = Each t is m1f
  source 1..243: mol_type = other RNA

SEQ ID NO: 20381 - RNA, 243 nt, synthetic construct; identical to SEQ ID NO: 18784
  modified_base 1..243: mod_base = OTHER; note = Each t is m1f
  source 1..243: mol_type = other RNA

SEQ ID NO: 20382 - RNA, 243 nt, synthetic construct; identical to SEQ ID NO: 18785
  modified_base 1..243: mod_base = OTHER; note = Each t is m1f
  source 1..243: mol_type = other RNA

SEQ ID NO: 20383 - RNA, 243 nt, synthetic construct; identical to SEQ ID NO: 18786
  modified_base 1..243: mod_base = OTHER; note = Each t is m1f
  source 1..243: mol_type = other RNA

SEQ ID NO: 20384 - RNA, 243 nt, synthetic construct; identical to SEQ ID NO: 18787
  modified_base 1..243: mod_base = OTHER; note = Each t is m1f
  source 1..243: mol_type = other RNA

SEQ ID NO: 20385 - RNA, 243 nt, synthetic construct; identical to SEQ ID NO: 18788
  modified_base 1..243: mod_base = OTHER; note = Each t is m1f
  source 1..243: mol_type = other RNA

SEQ ID NO: 20386 - RNA, 243 nt, synthetic construct; identical to SEQ ID NO: 18789
  modified_base 1..243: mod_base = OTHER; note = Each t is m1f
  source 1..243: mol_type = other RNA

SEQ ID NO: 20387 - RNA, 243 nt, synthetic construct; identical to SEQ ID NO: 18790
  modified_base 1..243: mod_base = OTHER; note = Each t is m1f
  source 1..243: mol_type = other RNA

SEQ ID NO: 20388 - RNA, 243 nt, synthetic construct; identical to SEQ ID NO: 18791
  modified_base 1..243: mod_base = OTHER; note = Each t is m1f
  source 1..243: mol_type = other RNA

SEQ ID NO: 20389 - RNA, 243 nt, synthetic construct; identical to SEQ ID NO: 18792
  modified_base 1..243: mod_base = OTHER; note = Each t is m1f
  source 1..243: mol_type = other RNA

SEQ ID NO: 20390 - RNA, 243 nt, synthetic construct; identical to SEQ ID NO: 18793
  modified_base 1..243: mod_base = OTHER; note = Each t is m1f
  source 1..243: mol_type = other RNA

SEQ ID NO: 20391 - RNA, 243 nt, synthetic construct; identical to SEQ ID NO: 18794
  modified_base 1..243: mod_base = OTHER; note = Each t is m1f
  source 1..243: mol_type = other RNA

SEQ ID NO: 20392 - RNA, 243 nt, synthetic construct; identical to SEQ ID NO: 18795
  modified_base 1..243: mod_base = OTHER; note = Each t is m1f
  source 1..243: mol_type = other RNA

SEQ ID NO: 20393 - RNA, 243 nt, synthetic construct; identical to SEQ ID NO: 18796
  modified_base 1..243: mod_base = OTHER; note = Each t is m1f
  source 1..243: mol_type = other RNA

SEQ ID NO: 20394 - RNA, 243 nt, synthetic construct; identical to SEQ ID NO: 18797
  modified_base 1..243: mod_base = OTHER; note = Each t is m1f
  source 1..243: mol_type = other RNA

SEQ ID NO: 20395 - RNA, 243 nt, synthetic construct; identical to SEQ ID NO: 18798
  modified_base 1..243: mod_base = OTHER; note = Each t is m1f
  source 1..243: mol_type = other RNA

SEQ ID NO: 20396 - RNA, 243 nt, synthetic construct; identical to SEQ ID NO: 18799
  modified_base 1..243: mod_base = OTHER; note = Each t is m1f
  source 1..243: mol_type = other RNA

SEQ ID NO: 20397 - RNA, 243 nt, synthetic construct; identical to SEQ ID NO: 18800
  modified_base 1..243: mod_base = OTHER; note = Each t is m1f
  source 1..243: mol_type = other RNA

SEQ ID NO: 20398 - RNA, 243 nt, synthetic construct; identical to SEQ ID NO: 18801
  modified_base 1..243: mod_base = OTHER; note = Each t is m1f
  source 1..243: mol_type = other RNA

SEQ ID NO: 20399 - RNA, 243 nt, synthetic construct; identical to SEQ ID NO: 18802
  modified_base 1..243: mod_base = OTHER; note = Each t is m1f
  source 1..243: mol_type = other RNA

SEQ ID NO: 20400 - RNA, 243 nt, synthetic construct; identical to SEQ ID NO: 18803
  modified_base 1..243: mod_base = OTHER; note = Each t is m1f
  source 1..243: mol_type = other RNA

SEQ ID NO: 20401 - RNA, 243 nt, synthetic construct; identical to SEQ ID NO: 18804
  modified_base 1..243: mod_base = OTHER; note = Each t is m1f
  source 1..243: mol_type = other RNA

SEQ ID NO: 20402 - RNA, 243 nt, synthetic construct; identical to SEQ ID NO: 18805
  modified_base 1..243: mod_base = OTHER; note = Each t is m1f
  source 1..243: mol_type = other RNA

SEQ ID NO: 20403 - RNA, 243 nt, synthetic construct; identical to SEQ ID NO: 18806
  modified_base 1..243: mod_base = OTHER; note = Each t is m1f
  source 1..243: mol_type = other RNA

SEQ ID NO: 20404 - RNA, 243 nt, synthetic construct; identical to SEQ ID NO: 18807
  modified_base 1..243: mod_base = OTHER; note = Each t is m1f
  source 1..243: mol_type = other RNA

SEQ ID NO: 20405 - RNA, 243 nt, synthetic construct; identical to SEQ ID NO: 18808
  modified_base 1..243: mod_base = OTHER; note = Each t is m1f
  source 1..243: mol_type = other RNA

SEQ ID NO: 20406 - RNA, 243 nt, synthetic construct; identical to SEQ ID NO: 18809
  modified_base 1..243: mod_base = OTHER; note = Each t is m1f
  source 1..243: mol_type = other RNA

SEQ ID NO: 20407 - RNA, 243 nt, synthetic construct; identical to SEQ ID NO: 18810
  modified_base 1..243: mod_base = OTHER; note = Each t is m1f
  source 1..243: mol_type = other RNA

SEQ ID NO: 20408 - RNA, 243 nt, synthetic construct; identical to SEQ ID NO: 18811
  modified_base 1..243: mod_base = OTHER; note = Each t is m1f
  source 1..243: mol_type = other RNA

SEQ ID NO: 20409 - RNA, 243 nt, synthetic construct; identical to SEQ ID NO: 18812
  modified_base 1..243: mod_base = OTHER; note = Each t is m1f
  source 1..243: mol_type = other RNA

SEQ ID NO: 20410 - RNA, 243 nt, synthetic construct; identical to SEQ ID NO: 18813
  modified_base 1..243: mod_base = OTHER; note = Each t is m1f
  source 1..243: mol_type = other RNA

SEQ ID NO: 20411 - RNA, 243 nt, synthetic construct; identical to SEQ ID NO: 18814
  modified_base 1..243: mod_base = OTHER; note = Each t is m1f
  source 1..243: mol_type = other RNA

SEQ ID NO: 20412 - RNA, 243 nt, synthetic construct; identical to SEQ ID NO: 18815
  modified_base 1..243: mod_base = OTHER; note = Each t is m1f
  source 1..243: mol_type = other RNA

SEQ ID NO: 20413 - RNA, 243 nt, synthetic construct; identical to SEQ ID NO: 18816
  modified_base 1..243: mod_base = OTHER; note = Each t is m1f
  source 1..243: mol_type = other RNA

SEQ ID NO: 20414 - RNA, 243 nt, synthetic construct; identical to SEQ ID NO: 18817
  modified_base 1..243: mod_base = OTHER; note = Each t is m1f
  source 1..243: mol_type = other RNA

SEQ ID NO: 20415 - RNA, 243 nt, synthetic construct; identical to SEQ ID NO: 18818
  modified_base 1..243: mod_base = OTHER; note = Each t is m1f
  source 1..243: mol_type = other RNA

SEQ ID NO: 20416 - RNA, 243 nt, synthetic construct; identical to SEQ ID NO: 18819
  modified_base 1..243: mod_base = OTHER; note = Each t is m1f
  source 1..243: mol_type = other RNA

SEQ ID NO: 20417 - RNA, 243 nt, synthetic construct; identical to SEQ ID NO: 18820
  modified_base 1..243: mod_base = OTHER; note = Each t is m1f
  source 1..243: mol_type = other RNA

SEQ ID NO: 20418 - RNA, 243 nt, synthetic construct; identical to SEQ ID NO: 18821
  modified_base 1..243: mod_base = OTHER; note = Each t is m1f
  source 1..243: mol_type = other RNA

SEQ ID NO: 20419 - RNA, 243 nt, synthetic construct; identical to SEQ ID NO: 18822
  modified_base 1..243: mod_base = OTHER; note = Each t is m1f
  source 1..243: mol_type = other RNA

SEQ ID NO: 20420 - RNA, 243 nt, synthetic construct; identical to SEQ ID NO: 18823
  modified_base 1..243: mod_base = OTHER; note = Each t is m1f
  source 1..243: mol_type = other RNA

SEQ ID NO: 20421 - RNA, 243 nt, synthetic construct; identical to SEQ ID NO: 18824
  modified_base 1..243: mod_base = OTHER; note = Each t is m1f
  source 1..243: mol_type = other RNA

SEQ ID NO: 20422 - RNA, 243 nt, synthetic construct; identical to SEQ ID NO: 18825
  modified_base 1..243: mod_base = OTHER; note = Each t is m1f
  source 1..243: mol_type = other RNA

SEQ ID NO: 20423 - RNA, 243 nt, synthetic construct; identical to SEQ ID NO: 18826
  modified_base 1..243: mod_base = OTHER; note = Each t is m1f
  source 1..243: mol_type = other RNA

SEQ ID NO: 20424 - RNA, 243 nt, synthetic construct; identical to SEQ ID NO: 18827
  modified_base 1..243: mod_base = OTHER; note = Each t is m1f
  source 1..243: mol_type = other RNA

SEQ ID NO: 20425 - RNA, 243 nt, synthetic construct; identical to SEQ ID NO: 18828
  modified_base 1..243: mod_base = OTHER; note = Each t is m1f
  source 1..243: mol_type = other RNA

SEQ ID NO: 20426 - RNA, 243 nt, synthetic construct; identical to SEQ ID NO: 18829
  modified_base 1..243: mod_base = OTHER; note = Each t is m1f
  source 1..243: mol_type = other RNA

SEQ ID NO: 20427 - RNA, 243 nt, synthetic construct; identical to SEQ ID NO: 18830
  modified_base 1..243: mod_base = OTHER; note = Each t is m1f
  source 1..243: mol_type = other RNA

SEQ ID NO: 20428 - RNA, 243 nt, synthetic construct; identical to SEQ ID NO: 18831
  modified_base 1..243: mod_base = OTHER; note = Each t is m1f
  source 1..243: mol_type = other RNA

SEQ ID NO: 20429 - RNA, 243 nt, synthetic construct; identical to SEQ ID NO: 18832
  modified_base 1..243: mod_base = OTHER; note = Each t is m1f
  source 1..243: mol_type = other RNA

SEQ ID NO: 20430 - RNA, 243 nt, synthetic construct; identical to SEQ ID NO: 18833
  modified_base 1..243: mod_base = OTHER; note = Each t is m1f
  source 1..243: mol_type = other RNA

SEQ ID NO: 20431 - RNA, 243 nt, synthetic construct; identical to SEQ ID NO: 18834
  modified_base 1..243: mod_base = OTHER; note = Each t is m1f
  source 1..243: mol_type = other RNA

SEQ ID NO: 20432 - RNA, 243 nt, synthetic construct; identical to SEQ ID NO: 18835
  modified_base 1..243: mod_base = OTHER; note = Each t is m1f
  source 1..243: mol_type = other RNA

SEQ ID NO: 20433 - RNA, 243 nt, synthetic construct; identical to SEQ ID NO: 18836
  modified_base 1..243: mod_base = OTHER; note = Each t is m1f
  source 1..243: mol_type = other RNA

SEQ ID NO: 20434 - RNA, 243 nt, synthetic construct; identical to SEQ ID NO: 18837
  modified_base 1..243: mod_base = OTHER; note = Each t is m1f
  source 1..243: mol_type = other RNA

SEQ ID NO: 20435 - RNA, 243 nt, synthetic construct; identical to SEQ ID NO: 18838
  modified_base 1..243: mod_base = OTHER; note = Each t is m1f
  source 1..243: mol_type = other RNA

SEQ ID NO: 20436 - RNA, 243 nt, synthetic construct; identical to SEQ ID NO: 18839
  modified_base 1..243: mod_base = OTHER; note = Each t is m1f
  source 1..243: mol_type = other RNA

SEQ ID NO: 20437 - RNA, 243 nt, synthetic construct; identical to SEQ ID NO: 18840
  modified_base 1..243: mod_base = OTHER; note = Each t is m1f
  source 1..243: mol_type = other RNA

SEQ ID NO: 20438 - RNA, 243 nt, synthetic construct; identical to SEQ ID NO: 18841
  modified_base 1..243: mod_base = OTHER; note = Each t is m1f
  source 1..243: mol_type = other RNA

SEQ ID NO: 20439 - RNA, 243 nt, synthetic construct; identical to SEQ ID NO: 18842
  modified_base 1..243: mod_base = OTHER; note = Each t is m1f
  source 1..243: mol_type = other RNA

SEQ ID NO: 20440 - RNA, 243 nt, synthetic construct; identical to SEQ ID NO: 18843
  modified_base 1..243: mod_base = OTHER; note = Each t is m1f
  source 1..243: mol_type = other RNA

SEQ ID NO: 20441 - RNA, 243 nt, synthetic construct; identical to SEQ ID NO: 18844
  modified_base 1..243: mod_base = OTHER; note = Each t is m1f
  source 1..243: mol_type = other RNA

SEQ ID NO: 20442 - RNA, 243 nt, synthetic construct; identical to SEQ ID NO: 18845
  modified_base 1..243: mod_base = OTHER; note = Each t is m1f
  source 1..243: mol_type = other RNA

SEQ ID NO: 20443 - RNA, 243 nt, synthetic construct; identical to SEQ ID NO: 18846
  modified_base 1..243: mod_base = OTHER; note = Each t is m1f
  source 1..243: mol_type = other RNA

SEQ ID NO: 20444 - RNA, 243 nt, synthetic construct; identical to SEQ ID NO: 18847
  modified_base 1..243: mod_base = OTHER; note = Each t is m1f
  source 1..243: mol_type = other RNA

SEQ ID NO: 20445 - RNA, 243 nt, synthetic construct; identical to SEQ ID NO: 18848
  modified_base 1..243: mod_base = OTHER; note = Each t is m1f
  source 1..243: mol_type = other RNA

SEQ ID NO: 20446 - RNA, 243 nt, synthetic construct; identical to SEQ ID NO: 18849
  modified_base 1..243: mod_base = OTHER; note = Each t is m1f
  source 1..243: mol_type = other RNA

SEQ ID NO: 20447 - RNA, 243 nt, synthetic construct; identical to SEQ ID NO: 18850
  modified_base 1..243: mod_base = OTHER; note = Each t is m1f
  source 1..243: mol_type = other RNA

SEQ ID NO: 20448 - RNA, 243 nt, synthetic construct; identical to SEQ ID NO: 18851
  modified_base 1..243: mod_base = OTHER; note = Each t is m1f
  source 1..243: mol_type = other RNA

SEQ ID NO: 20449 - RNA, 243 nt, synthetic construct; identical to SEQ ID NO: 18852
  modified_base 1..243: mod_base = OTHER; note = Each t is m1f
  source 1..243: mol_type = other RNA

SEQ ID NO: 20450 - RNA, 243 nt, synthetic construct; identical to SEQ ID NO: 18853
  modified_base 1..243: mod_base = OTHER; note = Each t is m1f
  source 1..243: mol_type = other RNA

SEQ ID NO: 20451 - RNA, 243 nt, synthetic construct; identical to SEQ ID NO: 18854
  modified_base 1..243: mod_base = OTHER; note = Each t is m1f
  source 1..243: mol_type = other RNA

SEQ ID NO: 20452 - RNA, 243 nt, synthetic construct; identical to SEQ ID NO: 18855
  modified_base 1..243: mod_base = OTHER; note = Each t is m1f
  source 1..243: mol_type = other RNA

SEQ ID NO: 20453 - RNA, 243 nt, synthetic construct; identical to SEQ ID NO: 18856
  modified_base 1..243: mod_base = OTHER; note = Each t is m1f
  source 1..243: mol_type = other RNA

SEQ ID NO: 20454 - RNA, 243 nt, synthetic construct; identical to SEQ ID NO: 18857
  modified_base 1..243: mod_base = OTHER; note = Each t is m1f
  source 1..243: mol_type = other RNA

SEQ ID NO: 20455 - RNA, 243 nt, synthetic construct; identical to SEQ ID NO: 18858
  modified_base 1..243: mod_base = OTHER; note = Each t is m1f
  source 1..243: mol_type = other RNA

SEQ ID NO: 20456 - RNA, 243 nt, synthetic construct; identical to SEQ ID NO: 18859
  modified_base 1..243: mod_base = OTHER; note = Each t is m1f
  source 1..243: mol_type = other RNA

SEQ ID NO: 20457 - RNA, 243 nt, synthetic construct; identical to SEQ ID NO: 18860
  modified_base 1..243: mod_base = OTHER; note = Each t is m1f
  source 1..243: mol_type = other RNA

SEQ ID NO: 20458 - RNA, 243 nt, synthetic construct; identical to SEQ ID NO: 18861
  modified_base 1..243: mod_base = OTHER; note = Each t is m1f
  source 1..243: mol_type = other RNA

SEQ ID NO: 20459 - RNA, 243 nt, synthetic construct; identical to SEQ ID NO: 18862
  modified_base 1..243: mod_base = OTHER; note = Each t is m1f
  source 1..243: mol_type = other RNA

SEQ ID NO: 20460 - RNA, 243 nt, synthetic construct; identical to SEQ ID NO: 18863
  modified_base 1..243: mod_base = OTHER; note = Each t is m1f
  source 1..243: mol_type = other RNA

SEQ ID NO: 20461 - RNA, 243 nt, synthetic construct; identical to SEQ ID NO: 18864
  modified_base 1..243: mod_base = OTHER; note = Each t is m1f
  source 1..243: mol_type = other RNA

SEQ ID NO: 20462 - RNA, 243 nt, synthetic construct; identical to SEQ ID NO: 18865
  modified_base 1..243: mod_base = OTHER; note = Each t is m1f
  source 1..243: mol_type = other RNA

SEQ ID NO: 20463 - RNA, 243 nt, synthetic construct; identical to SEQ ID NO: 18866
  modified_base 1..243: mod_base = OTHER; note = Each t is m1f
  source 1..243: mol_type = other RNA

SEQ ID NO: 20464 - RNA, 243 nt, synthetic construct; identical to SEQ ID NO: 18867
  modified_base 1..243: mod_base = OTHER; note = Each t is m1f
  source 1..243: mol_type = other RNA

SEQ ID NO: 20465 - RNA, 243 nt, synthetic construct; identical to SEQ ID NO: 18868
  modified_base 1..243: mod_base = OTHER; note = Each t is m1f
  source 1..243: mol_type = other RNA

SEQ ID NO: 20466 - RNA, 243 nt, synthetic construct; identical to SEQ ID NO: 18869
  modified_base 1..243: mod_base = OTHER; note = Each t is m1f
  source 1..243: mol_type = other RNA

SEQ ID NO: 20467 - RNA, 243 nt, synthetic construct; identical to SEQ ID NO: 18870
  modified_base 1..243: mod_base = OTHER; note = Each t is m1f
  source 1..243: mol_type = other RNA

SEQ ID NO: 20468 - RNA, 243 nt, synthetic construct; identical to SEQ ID NO: 18871
  modified_base 1..243: mod_base = OTHER; note = Each t is m1f
  source 1..243: mol_type = other RNA

SEQ ID NO: 20469 - RNA, 243 nt, synthetic construct; identical to SEQ ID NO: 18872
  modified_base 1..243: mod_base = OTHER; note = Each t is m1f
  source 1..243: mol_type = other RNA

SEQ ID NO: 20470 - RNA, 243 nt, synthetic construct; identical to SEQ ID NO: 18873
  modified_base 1..243: mod_base = OTHER; note = Each t is m1f
  source 1..243: mol_type = other RNA

SEQ ID NO: 20471 - RNA, 243 nt, synthetic construct; identical to SEQ ID NO: 18874
  modified_base 1..243: mod_base = OTHER; note = Each t is m1f
  source 1..243: mol_type = other RNA

SEQ ID NO: 20472 - RNA, 243 nt, synthetic construct; identical to SEQ ID NO: 18875
  modified_base 1..243: mod_base = OTHER; note = Each t is m1f
  source 1..243: mol_type = other RNA

SEQ ID NO: 20473 - RNA, 243 nt, synthetic construct; identical to SEQ ID NO: 18876
  modified_base 1..243: mod_base = OTHER; note = Each t is m1f
  source 1..243: mol_type = other RNA

SEQ ID NO: 20474 - RNA, 243 nt, synthetic construct; identical to SEQ ID NO: 18877
  modified_base 1..243: mod_base = OTHER; note = Each t is m1f
  source 1..243: mol_type = other RNA

SEQ ID NO: 20475 - RNA, 243 nt, synthetic construct; identical to SEQ ID NO: 18878
  modified_base 1..243: mod_base = OTHER; note = Each t is m1f
  source 1..243: mol_type = other RNA

SEQ ID NO: 20476 - RNA, 243 nt, synthetic construct; identical to SEQ ID NO: 18879
  modified_base 1..243: mod_base = OTHER; note = Each t is m1f
  source 1..243: mol_type = other RNA

SEQ ID NO: 20477 - RNA, 243 nt, synthetic construct; identical to SEQ ID NO: 18880
  modified_base 1..243: mod_base = OTHER; note = Each t is m1f
  source 1..243: mol_type = other RNA

SEQ ID NO: 20478 - RNA, 243 nt, synthetic construct; identical to SEQ ID NO: 18881
  modified_base 1..243: mod_base = OTHER; note = Each t is m1f
  source 1..243: mol_type = other RNA

SEQ ID NO: 20479 - RNA, 243 nt, synthetic construct; identical to SEQ ID NO: 18882
  modified_base 1..243: mod_base = OTHER; note = Each t is m1f
  source 1..243: mol_type = other RNA

SEQ ID NO: 20480 - RNA, 243 nt, synthetic construct; identical to SEQ ID NO: 18883
  modified_base 1..243: mod_base = OTHER; note = Each t is m1f
  source 1..243: mol_type = other RNA

SEQ ID NO: 20481 - RNA, 243 nt, synthetic construct; identical to SEQ ID NO: 18884
  modified_base 1..243: mod_base = OTHER; note = Each t is m1f
  source 1..243: mol_type = other RNA

SEQ ID NO: 20482 - RNA, 243 nt, synthetic construct; identical to SEQ ID NO: 18885
  modified_base 1..243: mod_base = OTHER; note = Each t is m1f
  source 1..243: mol_type = other RNA

SEQ ID NO: 20483 - RNA, 243 nt, synthetic construct; identical to SEQ ID NO: 18886
  modified_base 1..243: mod_base = OTHER; note = Each t is m1f
  source 1..243: mol_type = other RNA

SEQ ID NO: 20484 - RNA, 243 nt, synthetic construct; identical to SEQ ID NO: 18887
  modified_base 1..243: mod_base = OTHER; note = Each t is m1f
  source 1..243: mol_type = other RNA

SEQ ID NO: 20485 - RNA, 243 nt, synthetic construct; identical to SEQ ID NO: 18888
  modified_base 1..243: mod_base = OTHER; note = Each t is m1f
  source 1..243: mol_type = other RNA

SEQ ID NO: 20486 - RNA, 243 nt, synthetic construct; identical to SEQ ID NO: 18889
  modified_base 1..243: mod_base = OTHER; note = Each t is m1f
  source 1..243: mol_type = other RNA

SEQ ID NO: 20487 - RNA, 243 nt, synthetic construct; identical to SEQ ID NO: 18890
  modified_base 1..243: mod_base = OTHER; note = Each t is m1f
  source 1..243: mol_type = other RNA

SEQ ID NO: 20488 - RNA, 243 nt, synthetic construct; identical to SEQ ID NO: 18891
  modified_base 1..243: mod_base = OTHER; note = Each t is m1f
  source 1..243: mol_type = other RNA

SEQ ID NO: 20489 - RNA, 243 nt, synthetic construct; identical to SEQ ID NO: 18892
  modified_base 1..243: mod_base = OTHER; note = Each t is m1f
  source 1..243: mol_type = other RNA

SEQ ID NO: 20490 - RNA, 243 nt, synthetic construct; identical to SEQ ID NO: 18893
  modified_base 1..243: mod_base = OTHER; note = Each t is m1f
  source 1..243: mol_type = other RNA

SEQ ID NO: 20491 - RNA, 243 nt, synthetic construct; identical to SEQ ID NO: 18894
  modified_base 1..243: mod_base = OTHER; note = Each t is m1f
  source 1..243: mol_type = other RNA

SEQ ID NO: 20492 - RNA, 243 nt, synthetic construct; identical to SEQ ID NO: 18895
  modified_base 1..243: mod_base = OTHER; note = Each t is m1f
  source 1..243: mol_type = other RNA

SEQ ID NO: 20493 - RNA, 243 nt, synthetic construct; identical to SEQ ID NO: 18896
  modified_base 1..243: mod_base = OTHER; note = Each t is m1f
  source 1..243: mol_type = other RNA

SEQ ID NO: 20494 - RNA, 243 nt, synthetic construct; identical to SEQ ID NO: 18897
  modified_base 1..243: mod_base = OTHER; note = Each t is m1f
  source 1..243: mol_type = other RNA

SEQ ID NO: 20495 - RNA, 243 nt, synthetic construct; identical to SEQ ID NO: 18898
  modified_base 1..243: mod_base = OTHER; note = Each t is m1f
  source 1..243: mol_type = other RNA

SEQ ID NO: 20496 - RNA, 243 nt, synthetic construct; identical to SEQ ID NO: 18899
  modified_base 1..243: mod_base = OTHER; note = Each t is m1f
  source 1..243: mol_type = other RNA

SEQ ID NO: 20497 - RNA, 243 nt, synthetic construct; identical to SEQ ID NO: 18900
  modified_base 1..243: mod_base = OTHER; note = Each t is m1f
  source 1..243: mol_type = other RNA

SEQ ID NO: 20498 - RNA, 243 nt, synthetic construct; identical to SEQ ID NO: 18901
  modified_base 1..243: mod_base = OTHER; note = Each t is m1f
  source 1..243: mol_type = other RNA

SEQ ID NO: 20499 - RNA, 243 nt, synthetic construct; identical to SEQ ID NO: 18902
  modified_base 1..243: mod_base = OTHER; note = Each t is m1f
  source 1..243: mol_type = other RNA

SEQ ID NO: 20500 - RNA, 243 nt, synthetic construct; identical to SEQ ID NO: 18903
  modified_base 1..243: mod_base = OTHER; note = Each t is m1f
  source 1..243: mol_type = other RNA

SEQ ID NO: 20501 - RNA, 243 nt, synthetic construct; identical to SEQ ID NO: 18904
  modified_base 1..243: mod_base = OTHER; note = Each t is m1f
  source 1..243: mol_type = other RNA

SEQ ID NO: 20502 - RNA, 243 nt, synthetic construct; identical to SEQ ID NO: 18905
  modified_base 1..243: mod_base = OTHER; note = Each t is m1f
  source 1..243: mol_type = other RNA

SEQ ID NO: 20503 - RNA, 243 nt, synthetic construct; identical to SEQ ID NO: 18906
  modified_base 1..243: mod_base = OTHER; note = Each t is m1f
  source 1..243: mol_type = other RNA

SEQ ID NO: 20504 - RNA, 243 nt, synthetic construct; identical to SEQ ID NO: 18907
  modified_base 1..243: mod_base = OTHER; note = Each t is m1f
  source 1..243: mol_type = other RNA

SEQ ID NO: 20505 - RNA, 243 nt, synthetic construct; identical to SEQ ID NO: 18908
  modified_base 1..243: mod_base = OTHER; note = Each t is m1f
  source 1..243: mol_type = other RNA

SEQ ID NO: 20506 - RNA, 243 nt, synthetic construct; identical to SEQ ID NO: 18909
  modified_base 1..243: mod_base = OTHER; note = Each t is m1f
  source 1..243: mol_type = other RNA

SEQ ID NO: 20507 - RNA, 243 nt, synthetic construct; identical to SEQ ID NO: 18910
  modified_base 1..243: mod_base = OTHER; note = Each t is m1f
  source 1..243: mol_type = other RNA

SEQ ID NO: 20508 - RNA, 243 nt, synthetic construct; identical to SEQ ID NO: 18911
  modified_base 1..243: mod_base = OTHER; note = Each t is m1f
  source 1..243: mol_type = other RNA

SEQ ID NO: 20509 - RNA, 243 nt, synthetic construct; identical to SEQ ID NO: 18912
  modified_base 1..243: mod_base = OTHER; note = Each t is m1f
  source 1..243: mol_type = other RNA

SEQ ID NO: 20510 - RNA, 243 nt, synthetic construct; identical to SEQ ID NO: 18913
  modified_base 1..243: mod_base = OTHER; note = Each t is m1f
  source 1..243: mol_type = other RNA

SEQ ID NO: 20511 - RNA, 243 nt, synthetic construct; identical to SEQ ID NO: 18914
  modified_base 1..243: mod_base = OTHER; note = Each t is m1f
  source 1..243: mol_type = other RNA

SEQ ID NO: 20512 - RNA, 243 nt, synthetic construct; identical to SEQ ID NO: 18915
  modified_base 1..243: mod_base = OTHER; note = Each t is m1f
  source 1..243: mol_type = other RNA

SEQ ID NO: 20513 - RNA, 243 nt, synthetic construct; identical to SEQ ID NO: 18916
  modified_base 1..243: mod_base = OTHER; note = Each t is m1f
  source 1..243: mol_type = other RNA

SEQ ID NO: 20514 - RNA, 243 nt, synthetic construct; identical to SEQ ID NO: 18917
  modified_base 1..243: mod_base = OTHER; note = Each t is m1f
  source 1..243: mol_type = other RNA

SEQ ID NO: 20515 - RNA, 243 nt, synthetic construct; identical to SEQ ID NO: 18918
  modified_base 1..243: mod_base = OTHER; note = Each t is m1f
  source 1..243: mol_type = other RNA

SEQ ID NO: 20516 - RNA, 243 nt, synthetic construct; identical to SEQ ID NO: 18919
  modified_base 1..243: mod_base = OTHER; note = Each t is m1f
  source 1..243: mol_type = other RNA

SEQ ID NO: 20517 - RNA, 243 nt, synthetic construct; identical to SEQ ID NO: 18920
  modified_base 1..243: mod_base = OTHER; note = Each t is m1f
  source 1..243: mol_type = other RNA

SEQ ID NO: 20518 - RNA, 243 nt, synthetic construct; identical to SEQ ID NO: 18921
  modified_base 1..243: mod_base = OTHER; note = Each t is m1f
  source 1..243: mol_type = other RNA

SEQ ID NO: 20519 - RNA, 243 nt, synthetic construct; identical to SEQ ID NO: 18922
  modified_base 1..243: mod_base = OTHER; note = Each t is m1f
  source 1..243: mol_type = other RNA

SEQ ID NO: 20520 - RNA, 243 nt, synthetic construct; identical to SEQ ID NO: 18923
  modified_base 1..243: mod_base = OTHER; note = Each t is m1f
  source 1..243: mol_type = other RNA

SEQ ID NO: 20521 - RNA, 243 nt, synthetic construct; identical to SEQ ID NO: 18924
  modified_base 1..243: mod_base = OTHER; note = Each t is m1f
  source 1..243: mol_type = other RNA

SEQ ID NO: 20522 - RNA, 243 nt, synthetic construct; identical to SEQ ID NO: 18925
  modified_base 1..243: mod_base = OTHER; note = Each t is m1f
  source 1..243: mol_type = other RNA

SEQ ID NO: 20523 - RNA, 243 nt, synthetic construct; identical to SEQ ID NO: 18926
  modified_base 1..243: mod_base = OTHER; note = Each t is m1f
  source 1..243: mol_type = other RNA

SEQ ID NO: 20524 - RNA, 243 nt, synthetic construct; identical to SEQ ID NO: 18927
  modified_base 1..243: mod_base = OTHER; note = Each t is m1f
  source 1..243: mol_type = other RNA

SEQ ID NO: 20525 - RNA, 243 nt, synthetic construct; identical to SEQ ID NO: 18928
  modified_base 1..243: mod_base = OTHER; note = Each t is m1f
  source 1..243: mol_type = other RNA

SEQ ID NO: 20526 - RNA, 243 nt, synthetic construct; identical to SEQ ID NO: 18929
  modified_base 1..243: mod_base = OTHER; note = Each t is m1f
  source 1..243: mol_type = other RNA

SEQ ID NO: 20527 - RNA, 243 nt, synthetic construct; identical to SEQ ID NO: 18930
  modified_base 1..243: mod_base = OTHER; note = Each t is m1f
  source 1..243: mol_type = other RNA

SEQ ID NO: 20528 - RNA, 243 nt, synthetic construct; identical to SEQ ID NO: 18931
  modified_base 1..243: mod_base = OTHER; note = Each t is m1f
  source 1..243: mol_type = other RNA

SEQ ID NO: 20529 - RNA, 243 nt, synthetic construct; identical to SEQ ID NO: 18932
  modified_base 1..243: mod_base = OTHER; note = Each t is m1f
  source 1..243: mol_type = other RNA

SEQ ID NO: 20530 - RNA, 243 nt, synthetic construct; identical to SEQ ID NO: 18933
  modified_base 1..243: mod_base = OTHER; note = Each t is m1f
  source 1..243: mol_type = other RNA

SEQ ID NO: 20531 - RNA, 243 nt, synthetic construct; identical to SEQ ID NO: 18934
  modified_base 1..243: mod_base = OTHER; note = Each t is m1f
  source 1..243: mol_type = other RNA

SEQ ID NO: 20532 - RNA, 243 nt, synthetic construct; identical to SEQ ID NO: 18935
  modified_base 1..243: mod_base = OTHER; note = Each t is m1f
  source 1..243: mol_type = other RNA

SEQ ID NO: 20533 - RNA, 243 nt, synthetic construct; identical to SEQ ID NO: 18936
  modified_base 1..243: mod_base = OTHER; note = Each t is m1f
  source 1..243: mol_type = other RNA

SEQ ID NO: 20534 - RNA, 243 nt, synthetic construct; identical to SEQ ID NO: 18937
  modified_base 1..243: mod_base = OTHER; note = Each t is m1f
  source 1..243: mol_type = other RNA

SEQ ID NO: 20535 - RNA, 243 nt, synthetic construct; identical to SEQ ID NO: 18938
  modified_base 1..243: mod_base = OTHER; note = Each t is m1f
  source 1..243: mol_type = other RNA

SEQ ID NO: 20536 - RNA, 243 nt, synthetic construct; identical to SEQ ID NO: 18939
  modified_base 1..243: mod_base = OTHER; note = Each t is m1f
  source 1..243: mol_type = other RNA

SEQ ID NO: 20537 - RNA, 243 nt, synthetic construct; identical to SEQ ID NO: 18940
  modified_base 1..243: mod_base = OTHER; note = Each t is m1f
  source 1..243: mol_type = other RNA

SEQ ID NO: 20538 - RNA, 243 nt, synthetic construct; identical to SEQ ID NO: 18941
  modified_base 1..243: mod_base = OTHER; note = Each t is m1f
  source 1..243: mol_type = other RNA

SEQ ID NO: 20539 - RNA, 243 nt, synthetic construct; identical to SEQ ID NO: 18942
  modified_base 1..243: mod_base = OTHER; note = Each t is m1f
  source 1..243: mol_type = other RNA

SEQ ID NO: 20540 - RNA, 243 nt, synthetic construct; identical to SEQ ID NO: 18943
  modified_base 1..243: mod_base = OTHER; note = Each t is m1f
  source 1..243: mol_type = other RNA

SEQ ID NO: 20541 - RNA, 243 nt, synthetic construct; identical to SEQ ID NO: 18944
  modified_base 1..243: mod_base = OTHER; note = Each t is m1f
  source 1..243: mol_type = other RNA

SEQ ID NO: 20542 - RNA, 243 nt, synthetic construct; identical to SEQ ID NO: 18945
  modified_base 1..243: mod_base = OTHER; note = Each t is m1f
  source 1..243: mol_type = other RNA

SEQ ID NO: 20543 - RNA, 243 nt, synthetic construct; identical to SEQ ID NO: 18946
  modified_base 1..243: mod_base = OTHER; note = Each t is m1f
  source 1..243: mol_type = other RNA

SEQ ID NO: 20544 - RNA, 243 nt, synthetic construct; identical to SEQ ID NO: 18947
  modified_base 1..243: mod_base = OTHER; note = Each t is m1f
  source 1..243: mol_type = other RNA

SEQ ID NO: 20545 - RNA, 243 nt, synthetic construct; identical to SEQ ID NO: 18948
  modified_base 1..243: mod_base = OTHER; note = Each t is m1f
  source 1..243: mol_type = other RNA

SEQ ID NO: 20546 - RNA, 243 nt, synthetic construct; identical to SEQ ID NO: 18949
  modified_base 1..243: mod_base = OTHER; note = Each t is m1f
  source 1..243: mol_type = other RNA

SEQ ID NO: 20547 - RNA, 243 nt, synthetic construct; identical to SEQ ID NO: 18950
  modified_base 1..243: mod_base = OTHER; note = Each t is m1f
  source 1..243: mol_type = other RNA

SEQ ID NO: 20548 - RNA, 243 nt, synthetic construct; identical to SEQ ID NO: 18951
  modified_base 1..243: mod_base = OTHER; note = Each t is m1f
  source 1..243: mol_type = other RNA

SEQ ID NO: 20549 - RNA, 243 nt, synthetic construct; identical to SEQ ID NO: 18952
  modified_base 1..243: mod_base = OTHER; note = Each t is m1f
  source 1..243: mol_type = other RNA

SEQ ID NO: 20550 - RNA, 243 nt, synthetic construct; identical to SEQ ID NO: 18953
  modified_base 1..243: mod_base = OTHER; note = Each t is m1f
  source 1..243: mol_type = other RNA

SEQ ID NO: 20551 - RNA, 243 nt, synthetic construct; identical to SEQ ID NO: 18954
  modified_base 1..243: mod_base = OTHER; note = Each t is m1f
  source 1..243: mol_type = other RNA

SEQ ID NO: 20552 - RNA, 243 nt, synthetic construct; identical to SEQ ID NO: 18955
  modified_base 1..243: mod_base = OTHER; note = Each t is m1f
  source 1..243: mol_type = other RNA

SEQ ID NO: 20553 - RNA, 243 nt, synthetic construct; identical to SEQ ID NO: 18956
  modified_base 1..243: mod_base = OTHER; note = Each t is m1f
  source 1..243: mol_type = other RNA

SEQ ID NO: 20554 - RNA, 243 nt, synthetic construct; identical to SEQ ID NO: 18957
  modified_base 1..243: mod_base = OTHER; note = Each t is m1f
  source 1..243: mol_type = other RNA

SEQ ID NO: 20555 - RNA, 243 nt, synthetic construct; identical to SEQ ID NO: 18958
  modified_base 1..243: mod_base = OTHER; note = Each t is m1f
  source 1..243: mol_type = other RNA

SEQ ID NO: 20556 - RNA, 243 nt, synthetic construct; identical to SEQ ID NO: 18959
  modified_base 1..243: mod_base = OTHER; note = Each t is m1f
  source 1..243: mol_type = other RNA

SEQ ID NO: 20557 - RNA, 243 nt, synthetic construct; identical to SEQ ID NO: 18960
  modified_base 1..243: mod_base = OTHER; note = Each t is m1f
  source 1..243: mol_type = other RNA

SEQ ID NO: 20558 - RNA, 243 nt, synthetic construct; identical to SEQ ID NO: 18961
  modified_base 1..243: mod_base = OTHER; note = Each t is m1f
  source 1..243: mol_type = other RNA

SEQ ID NO: 20559 - RNA, 243 nt, synthetic construct; identical to SEQ ID NO: 18962
  modified_base 1..243: mod_base = OTHER; note = Each t is m1f
  source 1..243: mol_type = other RNA

SEQ ID NO: 20560 - RNA, 243 nt, synthetic construct; identical to SEQ ID NO: 18963
  modified_base 1..243: mod_base = OTHER; note = Each t is m1f
  source 1..243: mol_type = other RNA

SEQ ID NO: 20561 - RNA, 243 nt, synthetic construct; identical to SEQ ID NO: 18964
  modified_base 1..243: mod_base = OTHER; note = Each t is m1f
  source 1..243: mol_type = other RNA

SEQ ID NO: 20562 - RNA, 243 nt, synthetic construct; identical to SEQ ID NO: 18965
  modified_base 1..243: mod_base = OTHER; note = Each t is m1f
  source 1..243: mol_type = other RNA

SEQ ID NO: 20563 - RNA, 243 nt, synthetic construct; identical to SEQ ID NO: 18966
  modified_base 1..243: mod_base = OTHER; note = Each t is m1f
  source 1..243: mol_type = other RNA

SEQ ID NO: 20564 - RNA, 243 nt, synthetic construct; identical to SEQ ID NO: 18967
  modified_base 1..243: mod_base = OTHER; note = Each t is m1f
  source 1..243: mol_type = other RNA

SEQ ID NO: 20565 - RNA, 243 nt, synthetic construct; identical to SEQ ID NO: 18968
  modified_base 1..243: mod_base = OTHER; note = Each t is m1f
  source 1..243: mol_type = other RNA

SEQ ID NO: 20566 - RNA, 243 nt, synthetic construct; identical to SEQ ID NO: 18969
  modified_base 1..243: mod_base = OTHER; note = Each t is m1f
  source 1..243: mol_type = other RNA

SEQ ID NO: 20567 - RNA, 243 nt, synthetic construct; identical to SEQ ID NO: 18970
  modified_base 1..243: mod_base = OTHER; note = Each t is m1f
  source 1..243: mol_type = other RNA

SEQ ID NO: 20568 - RNA, 243 nt, synthetic construct; identical to SEQ ID NO: 18971
  modified_base 1..243: mod_base = OTHER; note = Each t is m1f
  source 1..243: mol_type = other RNA

SEQ ID NO: 20569 - RNA, 243 nt, synthetic construct; identical to SEQ ID NO: 18972
  modified_base 1..243: mod_base = OTHER; note = Each t is m1f
  source 1..243: mol_type = other RNA

SEQ ID NO: 20570 - RNA, 243 nt, synthetic construct; identical to SEQ ID NO: 18973
  modified_base 1..243: mod_base = OTHER; note = Each t is m1f
  source 1..243: mol_type = other RNA

SEQ ID NO: 20571 - RNA, 243 nt, synthetic construct; identical to SEQ ID NO: 18974
  modified_base 1..243: mod_base = OTHER; note = Each t is m1f
  source 1..243: mol_type = other RNA

SEQ ID NO: 20572 - RNA, 243 nt, synthetic construct; identical to SEQ ID NO: 18975
  modified_base 1..243: mod_base = OTHER; note = Each t is m1f
  source 1..243: mol_type = other RNA

SEQ ID NO: 20573 - RNA, 243 nt, synthetic construct; identical to SEQ ID NO: 18976
  modified_base 1..243: mod_base = OTHER; note = Each t is m1f
  source 1..243: mol_type = other RNA

SEQ ID NO: 20574 - RNA, 243 nt, synthetic construct; identical to SEQ ID NO: 18977
  modified_base 1..243: mod_base = OTHER; note = Each t is m1f
  source 1..243: mol_type = other RNA

SEQ ID NO: 20575 - RNA, 243 nt, synthetic construct; identical to SEQ ID NO: 18978
  modified_base 1..243: mod_base = OTHER; note = Each t is m1f
  source 1..243: mol_type = other RNA

SEQ ID NO: 20576 - RNA, 243 nt, synthetic construct; identical to SEQ ID NO: 18979
  modified_base 1..243: mod_base = OTHER; note = Each t is m1f
  source 1..243: mol_type = other RNA

SEQ ID NO: 20577 - RNA, 243 nt, synthetic construct; identical to SEQ ID NO: 18980
  modified_base 1..243: mod_base = OTHER; note = Each t is m1f
  source 1..243: mol_type = other RNA

SEQ ID NO: 20578 - RNA, 243 nt, synthetic construct; identical to SEQ ID NO: 18981
  modified_base 1..243: mod_base = OTHER; note = Each t is m1f
  source 1..243: mol_type = other RNA

SEQ ID NO: 20579 - RNA, 243 nt, synthetic construct; identical to SEQ ID NO: 18982
  modified_base 1..243: mod_base = OTHER; note = Each t is m1f
  source 1..243: mol_type = other RNA

SEQ ID NO: 20580 - RNA, 243 nt, synthetic construct; identical to SEQ ID NO: 18983
  modified_base 1..243: mod_base = OTHER; note = Each t is m1f
  source 1..243: mol_type = other RNA

SEQ ID NO: 20581 - RNA, 243 nt, synthetic construct; identical to SEQ ID NO: 18984
  modified_base 1..243: mod_base = OTHER; note = Each t is m1f
  source 1..243: mol_type = other RNA

SEQ ID NO: 20582 - RNA, 243 nt, synthetic construct; identical to SEQ ID NO: 18985
  modified_base 1..243: mod_base = OTHER; note = Each t is m1f
  source 1..243: mol_type = other RNA

SEQ ID NO: 20583 - RNA, 243 nt, synthetic construct; identical to SEQ ID NO: 18986
  modified_base 1..243: mod_base = OTHER; note = Each t is m1f
  source 1..243: mol_type = other RNA

SEQ ID NO: 20584 - RNA, 243 nt, synthetic construct; identical to SEQ ID NO: 18987
  modified_base 1..243: mod_base = OTHER; note = Each t is m1f
  source 1..243: mol_type = other RNA

SEQ ID NO: 20585 - RNA, 243 nt, synthetic construct; identical to SEQ ID NO: 18988
  modified_base 1..243: mod_base = OTHER; note = Each t is m1f
  source 1..243: mol_type = other RNA

SEQ ID NO: 20586 - RNA, 243 nt, synthetic construct; identical to SEQ ID NO: 18989
  modified_base 1..243: mod_base = OTHER; note = Each t is m1f
  source 1..243: mol_type = other RNA

SEQ ID NO: 20587 - RNA, 243 nt, synthetic construct; identical to SEQ ID NO: 18990
  modified_base 1..243: mod_base = OTHER; note = Each t is m1f
  source 1..243: mol_type = other RNA

SEQ ID NO: 20588 - RNA, 243 nt, synthetic construct; identical to SEQ ID NO: 18991
  modified_base 1..243: mod_base = OTHER; note = Each t is m1f
  source 1..243: mol_type = other RNA

SEQ ID NO: 20589 - RNA, 243 nt, synthetic construct; identical to SEQ ID NO: 18992
  modified_base 1..243: mod_base = OTHER; note = Each t is m1f
  source 1..243: mol_type = other RNA

SEQ ID NO: 20590 - RNA, 243 nt, synthetic construct; identical to SEQ ID NO: 18993
  modified_base 1..243: mod_base = OTHER; note = Each t is m1f
  source 1..243: mol_type = other RNA

SEQ ID NO: 20591 - RNA, 243 nt, synthetic construct; identical to SEQ ID NO: 18994
  modified_base 1..243: mod_base = OTHER; note = Each t is m1f
  source 1..243: mol_type = other RNA

SEQ ID NO: 20592 - RNA, 243 nt, synthetic construct; identical to SEQ ID NO: 18995
  modified_base 1..243: mod_base = OTHER; note = Each t is m1f
  source 1..243: mol_type = other RNA

SEQ ID NO: 20593 - RNA, 243 nt, synthetic construct; identical to SEQ ID NO: 18996
  modified_base 1..243: mod_base = OTHER; note = Each t is m1f
  source 1..243: mol_type = other RNA

SEQ ID NO: 20594 - RNA, 243 nt, synthetic construct; identical to SEQ ID NO: 18997
  modified_base 1..243: mod_base = OTHER; note = Each t is m1f
  source 1..243: mol_type = other RNA

SEQ ID NO: 20595 - RNA, 243 nt, synthetic construct; identical to SEQ ID NO: 18998
  modified_base 1..243: mod_base = OTHER; note = Each t is m1f
  source 1..243: mol_type = other RNA

SEQ ID NO: 20596 - RNA, 243 nt, synthetic construct; identical to SEQ ID NO: 18999
  modified_base 1..243: mod_base = OTHER; note = Each t is m1f
  source 1..243: mol_type = other RNA

SEQ ID NO: 20597 - RNA, 243 nt, synthetic construct; identical to SEQ ID NO: 19000
  modified_base 1..243: mod_base = OTHER; note = Each t is m1f
  source 1..243: mol_type = other RNA

SEQ ID NO: 20598 - RNA, 243 nt, synthetic construct; identical to SEQ ID NO: 19001
  modified_base 1..243: mod_base = OTHER; note = Each t is m1f
  source 1..243: mol_type = other RNA

SEQ ID NO: 20599 - RNA, 243 nt, synthetic construct; identical to SEQ ID NO: 19002
  modified_base 1..243: mod_base = OTHER; note = Each t is m1f
  source 1..243: mol_type = other RNA

SEQ ID NO: 20600 - RNA, 243 nt, synthetic construct; identical to SEQ ID NO: 19003
  modified_base 1..243: mod_base = OTHER; note = Each t is m1f
  source 1..243: mol_type = other RNA

SEQ ID NO: 20601 - RNA, 243 nt, synthetic construct; identical to SEQ ID NO: 19004
  modified_base 1..243: mod_base = OTHER; note = Each t is m1f
  source 1..243: mol_type = other RNA

SEQ ID NO: 20602 - RNA, 243 nt, synthetic construct; identical to SEQ ID NO: 19005
  modified_base 1..243: mod_base = OTHER; note = Each t is m1f
  source 1..243: mol_type = other RNA

SEQ ID NO: 20603 - RNA, 243 nt, synthetic construct; identical to SEQ ID NO: 19006
  modified_base 1..243: mod_base = OTHER; note = Each t is m1f
  source 1..243: mol_type = other RNA

SEQ ID NO: 20604 - RNA, 243 nt, synthetic construct; identical to SEQ ID NO: 19007
  modified_base 1..243: mod_base = OTHER; note = Each t is m1f
  source 1..243: mol_type = other RNA

SEQ ID NO: 20605 - RNA, 243 nt, synthetic construct; identical to SEQ ID NO: 19008
  modified_base 1..243: mod_base = OTHER; note = Each t is m1f
  source 1..243: mol_type = other RNA

SEQ ID NO: 20606 - RNA, 243 nt, synthetic construct; identical to SEQ ID NO: 19009
  modified_base 1..243: mod_base = OTHER; note = Each t is m1f
  source 1..243: mol_type = other RNA

SEQ ID NO: 20607 - RNA, 243 nt, synthetic construct; identical to SEQ ID NO: 19010
  modified_base 1..243: mod_base = OTHER; note = Each t is m1f
  source 1..243: mol_type = other RNA

SEQ ID NO: 20608 - RNA, 243 nt, synthetic construct; identical to SEQ ID NO: 19011
  modified_base 1..243: mod_base = OTHER; note = Each t is m1f
  source 1..243: mol_type = other RNA

SEQ ID NO: 20609 - RNA, 243 nt, synthetic construct; identical to SEQ ID NO: 19012
  modified_base 1..243: mod_base = OTHER; note = Each t is m1f
  source 1..243: mol_type = other RNA

SEQ ID NO: 20610 - RNA, 243 nt, synthetic construct; identical to SEQ ID NO: 19013
  modified_base 1..243: mod_base = OTHER; note = Each t is m1f
  source 1..243: mol_type = other RNA

SEQ ID NO: 20611 - RNA, 243 nt, synthetic construct; identical to SEQ ID NO: 19014
  modified_base 1..243: mod_base = OTHER; note = Each t is m1f
  source 1..243: mol_type = other RNA

SEQ ID NO: 20612 - RNA, 243 nt, synthetic construct; identical to SEQ ID NO: 19015
  modified_base 1..243: mod_base = OTHER; note = Each t is m1f
  source 1..243: mol_type = other RNA

SEQ ID NO: 20613 - RNA, 243 nt, synthetic construct; identical to SEQ ID NO: 19016
  modified_base 1..243: mod_base = OTHER; note = Each t is m1f
  source 1..243: mol_type = other RNA

SEQ ID NO: 20614 - RNA, 243 nt, synthetic construct; identical to SEQ ID NO: 19017
  modified_base 1..243: mod_base = OTHER; note = Each t is m1f
  source 1..243: mol_type = other RNA

SEQ ID NO: 20615 - RNA, 243 nt, synthetic construct; identical to SEQ ID NO: 19018
  modified_base 1..243: mod_base = OTHER; note = Each t is m1f
  source 1..243: mol_type = other RNA

SEQ ID NO: 20616 - RNA, 243 nt, synthetic construct; identical to SEQ ID NO: 19019
  modified_base 1..243: mod_base = OTHER; note = Each t is m1f
  source 1..243: mol_type = other RNA

SEQ ID NO: 20617 - RNA, 243 nt, synthetic construct; identical to SEQ ID NO: 19020
  modified_base 1..243: mod_base = OTHER; note = Each t is m1f
  source 1..243: mol_type = other RNA

SEQ ID NO: 20618 - RNA, 243 nt, synthetic construct; identical to SEQ ID NO: 19021
  modified_base 1..243: mod_base = OTHER; note = Each t is m1f
  source 1..243: mol_type = other RNA

SEQ ID NO: 20619 - RNA, 243 nt, synthetic construct; identical to SEQ ID NO: 19022
  modified_base 1..243: mod_base = OTHER; note = Each t is m1f
  source 1..243: mol_type = other RNA

SEQ ID NO: 20620 - RNA, 243 nt, synthetic construct; identical to SEQ ID NO: 19023
  modified_base 1..243: mod_base = OTHER; note = Each t is m1f
  source 1..243: mol_type = other RNA

SEQ ID NO: 20621 - RNA, 243 nt, synthetic construct; identical to SEQ ID NO: 19024
  modified_base 1..243: mod_base = OTHER; note = Each t is m1f
  source 1..243: mol_type = other RNA

SEQ ID NO: 20622 - RNA, 243 nt, synthetic construct; identical to SEQ ID NO: 19025
  modified_base 1..243: mod_base = OTHER; note = Each t is m1f
  source 1..243: mol_type = other RNA

SEQ ID NO: 20623 - RNA, 243 nt, synthetic construct; identical to SEQ ID NO: 19026
  modified_base 1..243: mod_base = OTHER; note = Each t is m1f
  source 1..243: mol_type = other RNA

SEQ ID NO: 20624 - RNA, 243 nt, synthetic construct; identical to SEQ ID NO: 19027
  modified_base 1..243: mod_base = OTHER; note = Each t is m1f
  source 1..243: mol_type = other RNA

SEQ ID NO: 20625 - RNA, 243 nt, synthetic construct; identical to SEQ ID NO: 19028
  modified_base 1..243: mod_base = OTHER; note = Each t is m1f
  source 1..243: mol_type = other RNA

SEQ ID NO: 20626 - RNA, 243 nt, synthetic construct; identical to SEQ ID NO: 19029
  modified_base 1..243: mod_base = OTHER; note = Each t is m1f
  source 1..243: mol_type = other RNA

SEQ ID NO: 20627 - RNA, 243 nt, synthetic construct; identical to SEQ ID NO: 19030
  modified_base 1..243: mod_base = OTHER; note = Each t is m1f
  source 1..243: mol_type = other RNA

SEQ ID NO: 20628 - RNA, 243 nt, synthetic construct; identical to SEQ ID NO: 19031
  modified_base 1..243: mod_base = OTHER; note = Each t is m1f
  source 1..243: mol_type = other RNA

SEQ ID NO: 20629 - RNA, 243 nt, synthetic construct; identical to SEQ ID NO: 19032
  modified_base 1..243: mod_base = OTHER; note = Each t is m1f
  source 1..243: mol_type = other RNA

SEQ ID NO: 20630 - RNA, 243 nt, synthetic construct; identical to SEQ ID NO: 19033
  modified_base 1..243: mod_base = OTHER; note = Each t is m1f
  source 1..243: mol_type = other RNA

SEQ ID NO: 20631 - RNA, 243 nt, synthetic construct; identical to SEQ ID NO: 19034
  modified_base 1..243: mod_base = OTHER; note = Each t is m1f
  source 1..243: mol_type = other RNA

SEQ ID NO: 20632 - RNA, 243 nt, synthetic construct; identical to SEQ ID NO: 19035
  modified_base 1..243: mod_base = OTHER; note = Each t is m1f
  source 1..243: mol_type = other RNA

SEQ ID NO: 20633 - RNA, 243 nt, synthetic construct; identical to SEQ ID NO: 19036
  modified_base 1..243: mod_base = OTHER; note = Each t is m1f
  source 1..243: mol_type = other RNA

SEQ ID NO: 20634 - RNA, 243 nt, synthetic construct; identical to SEQ ID NO: 19037
  modified_base 1..243: mod_base = OTHER; note = Each t is m1f
  source 1..243: mol_type = other RNA

SEQ ID NO: 20635 - RNA, 243 nt, synthetic construct; identical to SEQ ID NO: 19038
  modified_base 1..243: mod_base = OTHER; note = Each t is m1f
  source 1..243: mol_type = other RNA

SEQ ID NO: 20636 - RNA, 243 nt, synthetic construct; identical to SEQ ID NO: 19039
  modified_base 1..243: mod_base = OTHER; note = Each t is m1f
  source 1..243: mol_type = other RNA

SEQ ID NO: 20637 - RNA, 243 nt, synthetic construct; identical to SEQ ID NO: 19040
  modified_base 1..243: mod_base = OTHER; note = Each t is m1f
  source 1..243: mol_type = other RNA

SEQ ID NO: 20638 - RNA, 243 nt, synthetic construct; identical to SEQ ID NO: 19041
  modified_base 1..243: mod_base = OTHER; note = Each t is m1f
  source 1..243: mol_type = other RNA

SEQ ID NO: 20639 - RNA, 243 nt, synthetic construct; identical to SEQ ID NO: 19042
  modified_base 1..243: mod_base = OTHER; note = Each t is m1f
  source 1..243: mol_type = other RNA

SEQ ID NO: 20640 - RNA, 243 nt, synthetic construct; identical to SEQ ID NO: 19043
  modified_base 1..243: mod_base = OTHER; note = Each t is m1f
  source 1..243: mol_type = other RNA

SEQ ID NO: 20641 - RNA, 243 nt, synthetic construct; identical to SEQ ID NO: 19044
  modified_base 1..243: mod_base = OTHER; note = Each t is m1f
  source 1..243: mol_type = other RNA

SEQ ID NO: 20642 - RNA, 243 nt, synthetic construct; identical to SEQ ID NO: 19045
  modified_base 1..243: mod_base = OTHER; note = Each t is m1f
  source 1..243: mol_type = other RNA

SEQ ID NO: 20643 - RNA, 243 nt, synthetic construct; identical to SEQ ID NO: 19046
  modified_base 1..243: mod_base = OTHER; note = Each t is m1f
  source 1..243: mol_type = other RNA

SEQ ID NO: 20644 - RNA, 243 nt, synthetic construct; identical to SEQ ID NO: 19047
  modified_base 1..243: mod_base = OTHER; note = Each t is m1f
  source 1..243: mol_type = other RNA

SEQ ID NO: 20645 - RNA, 243 nt, synthetic construct; identical to SEQ ID NO: 19048
  modified_base 1..243: mod_base = OTHER; note = Each t is m1f
  source 1..243: mol_type = other RNA

SEQ ID NO: 20646 - RNA, 243 nt, synthetic construct; identical to SEQ ID NO: 19049
  modified_base 1..243: mod_base = OTHER; note = Each t is m1f
  source 1..243: mol_type = other RNA

SEQ ID NO: 20647 - RNA, 243 nt, synthetic construct; identical to SEQ ID NO: 19050
  modified_base 1..243: mod_base = OTHER; note = Each t is m1f
  source 1..243: mol_type = other RNA

SEQ ID NO: 20648 - RNA, 243 nt, synthetic construct; identical to SEQ ID NO: 19051
  modified_base 1..243: mod_base = OTHER; note = Each t is m1f
  source 1..243: mol_type = other RNA

SEQ ID NO: 20649 - RNA, 243 nt, synthetic construct; identical to SEQ ID NO: 19052
  modified_base 1..243: mod_base = OTHER; note = Each t is m1f
  source 1..243: mol_type = other RNA

SEQ ID NO: 20650 - RNA, 243 nt, synthetic construct; identical to SEQ ID NO: 19053
  modified_base 1..243: mod_base = OTHER; note = Each t is m1f
  source 1..243: mol_type = other RNA

SEQ ID NO: 20651 - RNA, 243 nt, synthetic construct; identical to SEQ ID NO: 19054
  modified_base 1..243: mod_base = OTHER; note = Each t is m1f
  source 1..243: mol_type = other RNA

SEQ ID NO: 20652 - RNA, 243 nt, synthetic construct; identical to SEQ ID NO: 19055
  modified_base 1..243: mod_base = OTHER; note = Each t is m1f
  source 1..243: mol_type = other RNA

SEQ ID NO: 20653 - RNA, 243 nt, synthetic construct; identical to SEQ ID NO: 19056
  modified_base 1..243: mod_base = OTHER; note = Each t is m1f
  source 1..243: mol_type = other RNA

SEQ ID NO: 20654 - RNA, 243 nt, synthetic construct; identical to SEQ ID NO: 19057
  modified_base 1..243: mod_base = OTHER; note = Each t is m1f
  source 1..243: mol_type = other RNA

SEQ ID NO: 20655 - RNA, 243 nt, synthetic construct; identical to SEQ ID NO: 19058
  modified_base 1..243: mod_base = OTHER; note = Each t is m1f
  source 1..243: mol_type = other RNA

SEQ ID NO: 20656 - RNA, 243 nt, synthetic construct; identical to SEQ ID NO: 19059
  modified_base 1..243: mod_base = OTHER; note = Each t is m1f
  source 1..243: mol_type = other RNA

SEQ ID NO: 20657 - RNA, 243 nt, synthetic construct; identical to SEQ ID NO: 19060
  modified_base 1..243: mod_base = OTHER; note = Each t is m1f
  source 1..243: mol_type = other RNA

SEQ ID NO: 20658 - RNA, 243 nt, synthetic construct; identical to SEQ ID NO: 19061
  modified_base 1..243: mod_base = OTHER; note = Each t is m1f
  source 1..243: mol_type = other RNA

SEQ ID NO: 20659 - RNA, 243 nt, synthetic construct; identical to SEQ ID NO: 19062
  modified_base 1..243: mod_base = OTHER; note = Each t is m1f
  source 1..243: mol_type = other RNA

SEQ ID NO: 20660 - RNA, 243 nt, synthetic construct; identical to SEQ ID NO: 19063
  modified_base 1..243: mod_base = OTHER; note = Each t is m1f
  source 1..243: mol_type = other RNA

SEQ ID NO: 20661 - RNA, 243 nt, synthetic construct; identical to SEQ ID NO: 19064
  modified_base 1..243: mod_base = OTHER; note = Each t is m1f
  source 1..243: mol_type = other RNA

SEQ ID NO: 20662 - RNA, 243 nt, synthetic construct; identical to SEQ ID NO: 19065
  modified_base 1..243: mod_base = OTHER; note = Each t is m1f
  source 1..243: mol_type = other RNA

SEQ ID NO: 20663 - RNA, 243 nt, synthetic construct; identical to SEQ ID NO: 19066
  modified_base 1..243: mod_base = OTHER; note = Each t is m1f
  source 1..243: mol_type = other RNA

SEQ ID NO: 20664 - RNA, 243 nt, synthetic construct; identical to SEQ ID NO: 19067
  modified_base 1..243: mod_base = OTHER; note = Each t is m1f
  source 1..243: mol_type = other RNA

SEQ ID NO: 20665 - RNA, 243 nt, synthetic construct; identical to SEQ ID NO: 19068
  modified_base 1..243: mod_base = OTHER; note = Each t is m1f
  source 1..243: mol_type = other RNA

SEQ ID NO: 20666 - RNA, 243 nt, synthetic construct; identical to SEQ ID NO: 19069
  modified_base 1..243: mod_base = OTHER; note = Each t is m1f
  source 1..243: mol_type = other RNA

SEQ ID NO: 20667 - RNA, 243 nt, synthetic construct; identical to SEQ ID NO: 19070
  modified_base 1..243: mod_base = OTHER; note = Each t is m1f
  source 1..243: mol_type = other RNA

SEQ ID NO: 20668 - RNA, 243 nt, synthetic construct; identical to SEQ ID NO: 19071
  modified_base 1..243: mod_base = OTHER; note = Each t is m1f
  source 1..243: mol_type = other RNA

SEQ ID NO: 20669 - RNA, 243 nt, synthetic construct; identical to SEQ ID NO: 19072
  modified_base 1..243: mod_base = OTHER; note = Each t is m1f
  source 1..243: mol_type = other RNA

SEQ ID NO: 20670 - RNA, 243 nt, synthetic construct; identical to SEQ ID NO: 19073
  modified_base 1..243: mod_base = OTHER; note = Each t is m1f
  source 1..243: mol_type = other RNA

SEQ ID NO: 20671 - RNA, 243 nt, synthetic construct; identical to SEQ ID NO: 19074
  modified_base 1..243: mod_base = OTHER; note = Each t is m1f
  source 1..243: mol_type = other RNA

SEQ ID NO: 20672 - RNA, 243 nt, synthetic construct; identical to SEQ ID NO: 19075
  modified_base 1..243: mod_base = OTHER; note = Each t is m1f
  source 1..243: mol_type = other RNA

SEQ ID NO: 20673 - RNA, 243 nt, synthetic construct; identical to SEQ ID NO: 19076
  modified_base 1..243: mod_base = OTHER; note = Each t is m1f
  source 1..243: mol_type = other RNA

SEQ ID NO: 20674 - RNA, 243 nt, synthetic construct; identical to SEQ ID NO: 19077
  modified_base 1..243: mod_base = OTHER; note = Each t is m1f
  source 1..243: mol_type = other RNA

SEQ ID NO: 20675 - RNA, 243 nt, synthetic construct; identical to SEQ ID NO: 19078
  modified_base 1..243: mod_base = OTHER; note = Each t is m1f
  source 1..243: mol_type = other RNA

SEQ ID NO: 20676 - RNA, 243 nt, synthetic construct; identical to SEQ ID NO: 19079
  modified_base 1..243: mod_base = OTHER; note = Each t is m1f
  source 1..243: mol_type = other RNA

SEQ ID NO: 20677 - RNA, 243 nt, synthetic construct; identical to SEQ ID NO: 19080
  modified_base 1..243: mod_base = OTHER; note = Each t is m1f
  source 1..243: mol_type = other RNA

SEQ ID NO: 20678 - RNA, 243 nt, synthetic construct; identical to SEQ ID NO: 19081
  modified_base 1..243: mod_base = OTHER; note = Each t is m1f
  source 1..243: mol_type = other RNA

SEQ ID NO: 20679 - RNA, 243 nt, synthetic construct; identical to SEQ ID NO: 19082
  modified_base 1..243: mod_base = OTHER; note = Each t is m1f
  source 1..243: mol_type = other RNA

SEQ ID NO: 20680 - RNA, 240 nt, synthetic construct; identical to SEQ ID NO: 19083
  modified_base 1..240: mod_base = OTHER; note = Each t is m1f
  source 1..240: mol_type = other RNA

SEQ ID NO: 20681 - RNA, 243 nt, synthetic construct; identical to SEQ ID NO: 19084
  modified_base 1..243: mod_base = OTHER; note = Each t is m1f
  source 1..243: mol_type = other RNA

SEQ ID NO: 20682 - RNA, 243 nt, synthetic construct; identical to SEQ ID NO: 19085
  modified_base 1..243: mod_base = OTHER; note = Each t is m1f
  source 1..243: mol_type = other RNA

SEQ ID NO: 20683 - RNA, 243 nt, synthetic construct; identical to SEQ ID NO: 19086
  modified_base 1..243: mod_base = OTHER; note = Each t is m1f
  source 1..243: mol_type = other RNA

SEQ ID NO: 20684 - RNA, 243 nt, synthetic construct; identical to SEQ ID NO: 19087
  modified_base 1..243: mod_base = OTHER; note = Each t is m1f
  source 1..243: mol_type = other RNA

SEQ ID NO: 20685 - RNA, 243 nt, synthetic construct; identical to SEQ ID NO: 19088
  modified_base 1..243: mod_base = OTHER; note = Each t is m1f
  source 1..243: mol_type = other RNA

SEQ ID NO: 20686 - RNA, 243 nt, synthetic construct; identical to SEQ ID NO: 19089
  modified_base 1..243: mod_base = OTHER; note = Each t is m1f
  source 1..243: mol_type = other RNA

SEQ ID NO: 20687 - RNA, 243 nt, synthetic construct; identical to SEQ ID NO: 19090
  modified_base 1..243: mod_base = OTHER; note = Each t is m1f
  source 1..243: mol_type = other RNA

SEQ ID NO: 20688 - RNA, 243 nt, synthetic construct; identical to SEQ ID NO: 19091
  modified_base 1..243: mod_base = OTHER; note = Each t is m1f
  source 1..243: mol_type = other RNA

SEQ ID NO: 20689 - RNA, 243 nt, synthetic construct; identical to SEQ ID NO: 19092
  modified_base 1..243: mod_base = OTHER; note = Each t is m1f
  source 1..243: mol_type = other RNA

SEQ ID NO: 20690 - RNA, 243 nt, synthetic construct; identical to SEQ ID NO: 19093
  modified_base 1..243: mod_base = OTHER; note = Each t is m1f
  source 1..243: mol_type = other RNA

SEQ ID NO: 20691 - RNA, 243 nt, synthetic construct; identical to SEQ ID NO: 19094
  modified_base 1..243: mod_base = OTHER; note = Each t is m1f
  source 1..243: mol_type = other RNA

SEQ ID NO: 20692 - RNA, 243 nt, synthetic construct; identical to SEQ ID NO: 19095
  modified_base 1..243: mod_base = OTHER; note = Each t is m1f
  source 1..243: mol_type = other RNA

SEQ ID NO: 20693 - RNA, 243 nt, synthetic construct; identical to SEQ ID NO: 19096
  modified_base 1..243: mod_base = OTHER; note = Each t is m1f
  source 1..243: mol_type = other RNA

SEQ ID NO: 20694 - RNA, 243 nt, synthetic construct; identical to SEQ ID NO: 19097
  modified_base 1..243: mod_base = OTHER; note = Each t is m1f
  source 1..243: mol_type = other RNA

SEQ ID NO: 20695 - RNA, 243 nt, synthetic construct; identical to SEQ ID NO: 19098
  modified_base 1..243: mod_base = OTHER; note = Each t is m1f
  source 1..243: mol_type = other RNA

SEQ ID NO: 20696 - RNA, 243 nt, synthetic construct; identical to SEQ ID NO: 19099
  modified_base 1..243: mod_base = OTHER; note = Each t is m1f
  source 1..243: mol_type = other RNA

SEQ ID NO: 20697 - RNA, 243 nt, synthetic construct; identical to SEQ ID NO: 19100
  modified_base 1..243: mod_base = OTHER; note = Each t is m1f
  source 1..243: mol_type = other RNA

SEQ ID NO: 20698 - RNA, 243 nt, synthetic construct; identical to SEQ ID NO: 19101
  modified_base 1..243: mod_base = OTHER; note = Each t is m1f
  source 1..243: mol_type = other RNA

SEQ ID NO: 20699 - RNA, 243 nt, synthetic construct; identical to SEQ ID NO: 19102
  modified_base 1..243: mod_base = OTHER; note = Each t is m1f
  source 1..243: mol_type = other RNA

SEQ ID NO: 20700 - RNA, 243 nt, synthetic construct; identical to SEQ ID NO: 19103
  modified_base 1..243: mod_base = OTHER; note = Each t is m1f
  source 1..243: mol_type = other RNA

SEQ ID NO: 20701 - RNA, 243 nt, synthetic construct; identical to SEQ ID NO: 19104
  modified_base 1..243: mod_base = OTHER; note = Each t is m1f
  source 1..243: mol_type = other RNA

SEQ ID NO: 20702 - RNA, 243 nt, synthetic construct; identical to SEQ ID NO: 19105
  modified_base 1..243: mod_base = OTHER; note = Each t is m1f
  source 1..243: mol_type = other RNA

SEQ ID NO: 20703 - RNA, 243 nt, synthetic construct; identical to SEQ ID NO: 19106
  modified_base 1..243: mod_base = OTHER; note = Each t is m1f
  source 1..243: mol_type = other RNA

SEQ ID NO: 20704 - RNA, 243 nt, synthetic construct; identical to SEQ ID NO: 19107
  modified_base 1..243: mod_base = OTHER; note = Each t is m1f
  source 1..243: mol_type = other RNA

SEQ ID NO: 20705 - RNA, 243 nt, synthetic construct; identical to SEQ ID NO: 19108
  modified_base 1..243: mod_base = OTHER; note = Each t is m1f
  source 1..243: mol_type = other RNA

SEQ ID NO: 20706 - RNA, 243 nt, synthetic construct; identical to SEQ ID NO: 19109
  modified_base 1..243: mod_base = OTHER; note = Each t is m1f
  source 1..243: mol_type = other RNA

SEQ ID NO: 20707 - RNA, 243 nt, synthetic construct; identical to SEQ ID NO: 19110
  modified_base 1..243: mod_base = OTHER; note = Each t is m1f
  source 1..243: mol_type = other RNA

SEQ ID NO: 20708 - RNA, 243 nt, synthetic construct; identical to SEQ ID NO: 19111
  modified_base 1..243: mod_base = OTHER; note = Each t is m1f
  source 1..243: mol_type = other RNA

SEQ ID NO: 20709 - RNA, 243 nt, synthetic construct; identical to SEQ ID NO: 19112
  modified_base 1..243: mod_base = OTHER; note = Each t is m1f
  source 1..243: mol_type = other RNA

SEQ ID NO: 20710 - RNA, 243 nt, synthetic construct; identical to SEQ ID NO: 19113
  modified_base 1..243: mod_base = OTHER; note = Each t is m1f
  source 1..243: mol_type = other RNA

SEQ ID NO: 20711 - RNA, 243 nt, synthetic construct; identical to SEQ ID NO: 19114
  modified_base 1..243: mod_base = OTHER; note = Each t is m1f
  source 1..243: mol_type = other RNA

SEQ ID NO: 20712 - RNA, 243 nt, synthetic construct; identical to SEQ ID NO: 19115
  modified_base 1..243: mod_base = OTHER; note = Each t is m1f
  source 1..243: mol_type = other RNA

SEQ ID NO: 20713 - RNA, 243 nt, synthetic construct; identical to SEQ ID NO: 19116
  modified_base 1..243: mod_base = OTHER; note = Each t is m1f
  source 1..243: mol_type = other RNA

SEQ ID NO: 20714 - RNA, 243 nt, synthetic construct; identical to SEQ ID NO: 19117
  modified_base 1..243: mod_base = OTHER; note = Each t is m1f
  source 1..243: mol_type = other RNA

SEQ ID NO: 20715 - RNA, 243 nt, synthetic construct; identical to SEQ ID NO: 19118
  modified_base 1..243: mod_base = OTHER; note = Each t is m1f
  source 1..243: mol_type = other RNA

SEQ ID NO: 20716 - RNA, 243 nt, synthetic construct; identical to SEQ ID NO: 19119
  modified_base 1..243: mod_base = OTHER; note = Each t is m1f
  source 1..243: mol_type = other RNA

SEQ ID NO: 20717 - RNA, 243 nt, synthetic construct; identical to SEQ ID NO: 19120
  modified_base 1..243: mod_base = OTHER; note = Each t is m1f
  source 1..243: mol_type = other RNA

SEQ ID NO: 20718 - RNA, 243 nt, synthetic construct; identical to SEQ ID NO: 19121
  modified_base 1..243: mod_base = OTHER; note = Each t is m1f
  source 1..243: mol_type = other RNA

SEQ ID NO: 20719 - RNA, 243 nt, synthetic construct; identical to SEQ ID NO: 19122
  modified_base 1..243: mod_base = OTHER; note = Each t is m1f
  source 1..243: mol_type = other RNA

SEQ ID NO: 20720 - RNA, 243 nt, synthetic construct; identical to SEQ ID NO: 19123
  modified_base 1..243: mod_base = OTHER; note = Each t is m1f
  source 1..243: mol_type = other RNA

SEQ ID NO: 20721 - RNA, 243 nt, synthetic construct; identical to SEQ ID NO: 19124
  modified_base 1..243: mod_base = OTHER; note = Each t is m1f
  source 1..243: mol_type = other RNA

SEQ ID NO: 20722 - RNA, 243 nt, synthetic construct; identical to SEQ ID NO: 19125
  modified_base 1..243: mod_base = OTHER; note = Each t is m1f
  source 1..243: mol_type = other RNA

SEQ ID NO: 20723 - RNA, 243 nt, synthetic construct; identical to SEQ ID NO: 19126
  modified_base 1..243: mod_base = OTHER; note = Each t is m1f
  source 1..243: mol_type = other RNA

SEQ ID NO: 20724 - RNA, 243 nt, synthetic construct; identical to SEQ ID NO: 19127
  modified_base 1..243: mod_base = OTHER; note = Each t is m1f
  source 1..243: mol_type = other RNA

SEQ ID NO: 20725 - RNA, 243 nt, synthetic construct; identical to SEQ ID NO: 19128
  modified_base 1..243: mod_base = OTHER; note = Each t is m1f
  source 1..243: mol_type = other RNA

SEQ ID NO: 20726 - RNA, 243 nt, synthetic construct; identical to SEQ ID NO: 19129
  modified_base 1..243: mod_base = OTHER; note = Each t is m1f
  source 1..243: mol_type = other RNA

SEQ ID NO: 20727 - RNA, 243 nt, synthetic construct; identical to SEQ ID NO: 19130
  modified_base 1..243: mod_base = OTHER; note = Each t is m1f
  source 1..243: mol_type = other RNA

SEQ ID NO: 20728 - RNA, 243 nt, synthetic construct; identical to SEQ ID NO: 19131
  modified_base 1..243: mod_base = OTHER; note = Each t is m1f
  source 1..243: mol_type = other RNA

SEQ ID NO: 20729 - RNA, 243 nt, synthetic construct; identical to SEQ ID NO: 19132
  modified_base 1..243: mod_base = OTHER; note = Each t is m1f
  source 1..243: mol_type = other RNA

SEQ ID NO: 20730 - RNA, 243 nt, synthetic construct; identical to SEQ ID NO: 19133
  modified_base 1..243: mod_base = OTHER; note = Each t is m1f
  source 1..243: mol_type = other RNA

SEQ ID NO: 20731 - RNA, 243 nt, synthetic construct; identical to SEQ ID NO: 19134
  modified_base 1..243: mod_base = OTHER; note = Each t is m1f
  source 1..243: mol_type = other RNA

SEQ ID NO: 20732 - RNA, 243 nt, synthetic construct; identical to SEQ ID NO: 19135
  modified_base 1..243: mod_base = OTHER; note = Each t is m1f
  source 1..243: mol_type = other RNA

SEQ ID NO: 20733 - RNA, 243 nt, synthetic construct; identical to SEQ ID NO: 19136
  modified_base 1..243: mod_base = OTHER; note = Each t is m1f
  source 1..243: mol_type = other RNA

SEQ ID NO: 20734 - RNA, 243 nt, synthetic construct; identical to SEQ ID NO: 19137
  modified_base 1..243: mod_base = OTHER; note = Each t is m1f
  source 1..243: mol_type = other RNA

SEQ ID NO: 20735 - RNA, 243 nt, synthetic construct; identical to SEQ ID NO: 19138
  modified_base 1..243: mod_base = OTHER; note = Each t is m1f
  source 1..243: mol_type = other RNA

SEQ ID NO: 20736 - RNA, 243 nt, synthetic construct; identical to SEQ ID NO: 19139
  modified_base 1..243: mod_base = OTHER; note = Each t is m1f
  source 1..243: mol_type = other RNA

SEQ ID NO: 20737 - RNA, 243 nt, synthetic construct; identical to SEQ ID NO: 19140
  modified_base 1..243: mod_base = OTHER; note = Each t is m1f
  source 1..243: mol_type = other RNA

SEQ ID NO: 20738 - RNA, 243 nt, synthetic construct; identical to SEQ ID NO: 19141
  modified_base 1..243: mod_base = OTHER; note = Each t is m1f
  source 1..243: mol_type = other RNA

SEQ ID NO: 20739 - RNA, 243 nt, synthetic construct; identical to SEQ ID NO: 19142
  modified_base 1..243: mod_base = OTHER; note = Each t is m1f
  source 1..243: mol_type = other RNA

SEQ ID NO: 20740 - RNA, 243 nt, synthetic construct; identical to SEQ ID NO: 19143
  modified_base 1..243: mod_base = OTHER; note = Each t is m1f
  source 1..243: mol_type = other RNA

SEQ ID NO: 20741 - RNA, 243 nt, synthetic construct; identical to SEQ ID NO: 19144
  modified_base 1..243: mod_base = OTHER; note = Each t is m1f
  source 1..243: mol_type = other RNA

SEQ ID NO: 20742 - RNA, 243 nt, synthetic construct; identical to SEQ ID NO: 19145
  modified_base 1..243: mod_base = OTHER; note = Each t is m1f
  source 1..243: mol_type = other RNA

SEQ ID NO: 20743 - RNA, 243 nt, synthetic construct; identical to SEQ ID NO: 19146
  modified_base 1..243: mod_base = OTHER; note = Each t is m1f
  source 1..243: mol_type = other RNA

SEQ ID NO: 20744 - RNA, 243 nt, synthetic construct; identical to SEQ ID NO: 19147
  modified_base 1..243: mod_base = OTHER; note = Each t is m1f
  source 1..243: mol_type = other RNA

SEQ ID NO: 20745 - RNA, 243 nt, synthetic construct; identical to SEQ ID NO: 19148
  modified_base 1..243: mod_base = OTHER; note = Each t is m1f
  source 1..243: mol_type = other RNA

SEQ ID NO: 20746 - RNA, 243 nt, synthetic construct; identical to SEQ ID NO: 19149
  modified_base 1..243: mod_base = OTHER; note = Each t is m1f
  source 1..243: mol_type = other RNA

SEQ ID NO: 20747 - RNA, 243 nt, synthetic construct; identical to SEQ ID NO: 19150
  modified_base 1..243: mod_base = OTHER; note = Each t is m1f
  source 1..243: mol_type = other RNA

SEQ ID NO: 20748 - RNA, 243 nt, synthetic construct; identical to SEQ ID NO: 19151
  modified_base 1..243: mod_base = OTHER; note = Each t is m1f
  source 1..243: mol_type = other RNA

SEQ ID NO: 20749 - RNA, 243 nt, synthetic construct; identical to SEQ ID NO: 19152
  modified_base 1..243: mod_base = OTHER; note = Each t is m1f
  source 1..243: mol_type = other RNA

SEQ ID NO: 20750 - RNA, 243 nt, synthetic construct; identical to SEQ ID NO: 19153
  modified_base 1..243: mod_base = OTHER; note = Each t is m1f
  source 1..243: mol_type = other RNA

SEQ ID NO: 20751 - RNA, 243 nt, synthetic construct; identical to SEQ ID NO: 19154
  modified_base 1..243: mod_base = OTHER; note = Each t is m1f
  source 1..243: mol_type = other RNA

SEQ ID NO: 20752 - RNA, 243 nt, synthetic construct; identical to SEQ ID NO: 19155
  modified_base 1..243: mod_base = OTHER; note = Each t is m1f
  source 1..243: mol_type = other RNA

SEQ ID NO: 20753 - RNA, 243 nt, synthetic construct; identical to SEQ ID NO: 19156
  modified_base 1..243: mod_base = OTHER; note = Each t is m1f
  source 1..243: mol_type = other RNA

SEQ ID NO: 20754 - RNA, 243 nt, synthetic construct; identical to SEQ ID NO: 19157
  modified_base 1..243: mod_base = OTHER; note = Each t is m1f
  source 1..243: mol_type = other RNA

SEQ ID NO: 20755 - RNA, 243 nt, synthetic construct; identical to SEQ ID NO: 19158
  modified_base 1..243: mod_base = OTHER; note = Each t is m1f
  source 1..243: mol_type = other RNA

SEQ ID NO: 20756 - RNA, 243 nt, synthetic construct; identical to SEQ ID NO: 19159
  modified_base 1..243: mod_base = OTHER; note = Each t is m1f
  source 1..243: mol_type = other RNA

SEQ ID NO: 20757 - RNA, 243 nt, synthetic construct; identical to SEQ ID NO: 19160
  modified_base 1..243: mod_base = OTHER; note = Each t is m1f
  source 1..243: mol_type = other RNA

SEQ ID NO: 20758 - RNA, 243 nt, synthetic construct; identical to SEQ ID NO: 19161
  modified_base 1..243: mod_base = OTHER; note = Each t is m1f
  source 1..243: mol_type = other RNA

SEQ ID NO: 20759 - RNA, 243 nt, synthetic construct; identical to SEQ ID NO: 19162
  modified_base 1..243: mod_base = OTHER; note = Each t is m1f
  source 1..243: mol_type = other RNA

SEQ ID NO: 20760 - RNA, 243 nt, synthetic construct; identical to SEQ ID NO: 19163
  modified_base 1..243: mod_base = OTHER; note = Each t is m1f
  source 1..243: mol_type = other RNA

SEQ ID NO: 20761 - RNA, 243 nt, synthetic construct; identical to SEQ ID NO: 19164
  modified_base 1..243: mod_base = OTHER; note = Each t is m1f
  source 1..243: mol_type = other RNA

SEQ ID NO: 20762 - RNA, 243 nt, synthetic construct; identical to SEQ ID NO: 19165
  modified_base 1..243: mod_base = OTHER; note = Each t is m1f
  source 1..243: mol_type = other RNA

SEQ ID NO: 20763 - RNA, 243 nt, synthetic construct; identical to SEQ ID NO: 19166
  modified_base 1..243: mod_base = OTHER; note = Each t is m1f
  source 1..243: mol_type = other RNA

SEQ ID NO: 20764 - RNA, 243 nt, synthetic construct; identical to SEQ ID NO: 19167
  modified_base 1..243: mod_base = OTHER; note = Each t is m1f
  source 1..243: mol_type = other RNA

SEQ ID NO: 20765 - RNA, 243 nt, synthetic construct; identical to SEQ ID NO: 19168
  modified_base 1..243: mod_base = OTHER; note = Each t is m1f
  source 1..243: mol_type = other RNA

SEQ ID NO: 20766 - RNA, 243 nt, synthetic construct; identical to SEQ ID NO: 19169
  modified_base 1..243: mod_base = OTHER; note = Each t is m1f
  source 1..243: mol_type = other RNA

SEQ ID NO: 20767 - RNA, 243 nt, synthetic construct; identical to SEQ ID NO: 19170
  modified_base 1..243: mod_base = OTHER; note = Each t is m1f
  source 1..243: mol_type = other RNA

SEQ ID NO: 20768 - RNA, 243 nt, synthetic construct; identical to SEQ ID NO: 19171
  modified_base 1..243: mod_base = OTHER; note = Each t is m1f
  source 1..243: mol_type = other RNA

SEQ ID NO: 20769 - RNA, 243 nt, synthetic construct; identical to SEQ ID NO: 19172
  modified_base 1..243: mod_base = OTHER; note = Each t is m1f
  source 1..243: mol_type = other RNA

SEQ ID NO: 20770 - RNA, 243 nt, synthetic construct; identical to SEQ ID NO: 19173
  modified_base 1..243: mod_base = OTHER; note = Each t is m1f
  source 1..243: mol_type = other RNA

SEQ ID NO: 20771 - RNA, 243 nt, synthetic construct; identical to SEQ ID NO: 19174
  modified_base 1..243: mod_base = OTHER; note = Each t is m1f
  source 1..243: mol_type = other RNA

SEQ ID NO: 20772 - RNA, 243 nt, synthetic construct; identical to SEQ ID NO: 19175
  modified_base 1..243: mod_base = OTHER; note = Each t is m1f
  source 1..243: mol_type = other RNA

SEQ ID NO: 20773 - RNA, 243 nt, synthetic construct; identical to SEQ ID NO: 19176
  modified_base 1..243: mod_base = OTHER; note = Each t is m1f
  source 1..243: mol_type = other RNA

SEQ ID NO: 20774 - RNA, 243 nt, synthetic construct; identical to SEQ ID NO: 19177
  modified_base 1..243: mod_base = OTHER; note = Each t is m1f
  source 1..243: mol_type = other RNA

SEQ ID NO: 20775 - RNA, 243 nt, synthetic construct; identical to SEQ ID NO: 19178
  modified_base 1..243: mod_base = OTHER; note = Each t is m1f
  source 1..243: mol_type = other RNA

SEQ ID NO: 20776 - RNA, 243 nt, synthetic construct; identical to SEQ ID NO: 19179
  modified_base 1..243: mod_base = OTHER; note = Each t is m1f
  source 1..243: mol_type = other RNA

SEQ ID NO: 20777 - RNA, 243 nt, synthetic construct; identical to SEQ ID NO: 19180
  modified_base 1..243: mod_base = OTHER; note = Each t is m1f
  source 1..243: mol_type = other RNA

SEQ ID NO: 20778 - RNA, 243 nt, synthetic construct; identical to SEQ ID NO: 19181
  modified_base 1..243: mod_base = OTHER; note = Each t is m1f
  source 1..243: mol_type = other RNA

SEQ ID NO: 20779 - RNA, 243 nt, synthetic construct; identical to SEQ ID NO: 19182
  modified_base 1..243: mod_base = OTHER; note = Each t is m1f
  source 1..243: mol_type = other RNA

SEQ ID NO: 20780 - RNA, 243 nt, synthetic construct; identical to SEQ ID NO: 19183
  modified_base 1..243: mod_base = OTHER; note = Each t is m1f
  source 1..243: mol_type = other RNA

SEQ ID NO: 20781 - RNA, 243 nt, synthetic construct; identical to SEQ ID NO: 19184
  modified_base 1..243: mod_base = OTHER; note = Each t is m1f
  source 1..243: mol_type = other RNA

SEQ ID NO: 20782 - RNA, 243 nt, synthetic construct; identical to SEQ ID NO: 19185
  modified_base 1..243: mod_base = OTHER; note = Each t is m1f
  source 1..243: mol_type = other RNA

SEQ ID NO: 20783 - RNA, 243 nt, synthetic construct; identical to SEQ ID NO: 19186
  modified_base 1..243: mod_base = OTHER; note = Each t is m1f
  source 1..243: mol_type = other RNA

SEQ ID NO: 20784 - RNA, 243 nt, synthetic construct; identical to SEQ ID NO: 19187
  modified_base 1..243: mod_base = OTHER; note = Each t is m1f
  source 1..243: mol_type = other RNA

SEQ ID NO: 20785 - RNA, 243 nt, synthetic construct; identical to SEQ ID NO: 19188
  modified_base 1..243: mod_base = OTHER; note = Each t is m1f
  source 1..243: mol_type = other RNA

SEQ ID NO: 20786 - RNA, 243 nt, synthetic construct; identical to SEQ ID NO: 19189
  modified_base 1..243: mod_base = OTHER; note = Each t is m1f
  source 1..243: mol_type = other RNA

SEQ ID NO: 20787 - RNA, 243 nt, synthetic construct; identical to SEQ ID NO: 19190
  modified_base 1..243: mod_base = OTHER; note = Each t is m1f
  source 1..243: mol_type = other RNA

SEQ ID NO: 20788 - RNA, 243 nt, synthetic construct; identical to SEQ ID NO: 19191
  modified_base 1..243: mod_base = OTHER; note = Each t is m1f
  source 1..243: mol_type = other RNA

SEQ ID NO: 20789 - RNA, 243 nt, synthetic construct; identical to SEQ ID NO: 19192
  modified_base 1..243: mod_base = OTHER; note = Each t is m1f
  source 1..243: mol_type = other RNA

SEQ ID NO: 20790 - RNA, 243 nt, synthetic construct; identical to SEQ ID NO: 19193
  modified_base 1..243: mod_base = OTHER; note = Each t is m1f
  source 1..243: mol_type = other RNA

SEQ ID NO: 20791 - RNA, 243 nt, synthetic construct; identical to SEQ ID NO: 19194
  modified_base 1..243: mod_base = OTHER; note = Each t is m1f
  source 1..243: mol_type = other RNA

SEQ ID NO: 20792 - RNA, 243 nt, synthetic construct; identical to SEQ ID NO: 19195
  modified_base 1..243: mod_base = OTHER; note = Each t is m1f
  source 1..243: mol_type = other RNA

SEQ ID NO: 20793 - RNA, 243 nt, synthetic construct; identical to SEQ ID NO: 19196
  modified_base 1..243: mod_base = OTHER; note = Each t is m1f
  source 1..243: mol_type = other RNA

SEQ ID NO: 20794 - RNA, 243 nt, synthetic construct; identical to SEQ ID NO: 19197
  modified_base 1..243: mod_base = OTHER; note = Each t is m1f
  source 1..243: mol_type = other RNA

SEQ ID NO: 20795 - RNA, 243 nt, synthetic construct; identical to SEQ ID NO: 19198
  modified_base 1..243: mod_base = OTHER; note = Each t is m1f
  source 1..243: mol_type = other RNA

SEQ ID NO: 20796 - RNA, 243 nt, synthetic construct; identical to SEQ ID NO: 19199
  modified_base 1..243: mod_base = OTHER; note = Each t is m1f
  source 1..243: mol_type = other RNA

SEQ ID NO: 20797 - RNA, 243 nt, synthetic construct; identical to SEQ ID NO: 19200
  modified_base 1..243: mod_base = OTHER; note = Each t is m1f
  source 1..243: mol_type = other RNA

SEQ ID NO: 20798 - RNA, 243 nt, synthetic construct; identical to SEQ ID NO: 19201
  modified_base 1..243: mod_base = OTHER; note = Each t is m1f
  source 1..243: mol_type = other RNA

SEQ ID NO: 20799 - RNA, 243 nt, synthetic construct; identical to SEQ ID NO: 19202
  modified_base 1..243: mod_base = OTHER; note = Each t is m1f
  source 1..243: mol_type = other RNA

SEQ ID NO: 20800 - RNA, 243 nt, synthetic construct; identical to SEQ ID NO: 19203
  modified_base 1..243: mod_base = OTHER; note = Each t is m1f
  source 1..243: mol_type = other RNA

SEQ ID NO: 20801 - RNA, 243 nt, synthetic construct; identical to SEQ ID NO: 19204
  modified_base 1..243: mod_base = OTHER; note = Each t is m1f
  source 1..243: mol_type = other RNA

SEQ ID NO: 20802 - RNA, 243 nt, synthetic construct; identical to SEQ ID NO: 19205
  modified_base 1..243: mod_base = OTHER; note = Each t is m1f
  source 1..243: mol_type = other RNA

SEQ ID NO: 20803 - RNA, 243 nt, synthetic construct; identical to SEQ ID NO: 19206
  modified_base 1..243: mod_base = OTHER; note = Each t is m1f
  source 1..243: mol_type = other RNA

SEQ ID NO: 20804 - RNA, 243 nt, synthetic construct; identical to SEQ ID NO: 19207
  modified_base 1..243: mod_base = OTHER; note = Each t is m1f
  source 1..243: mol_type = other RNA

SEQ ID NO: 20805 - RNA, 243 nt, synthetic construct; identical to SEQ ID NO: 19208
  modified_base 1..243: mod_base = OTHER; note = Each t is m1f
  source 1..243: mol_type = other RNA

SEQ ID NO: 20806 - RNA, 243 nt, synthetic construct; identical to SEQ ID NO: 19209
  modified_base 1..243: mod_base = OTHER; note = Each t is m1f
  source 1..243: mol_type = other RNA

SEQ ID NO: 20807 - RNA, 243 nt, synthetic construct; identical to SEQ ID NO: 19210
  modified_base 1..243: mod_base = OTHER; note = Each t is m1f
  source 1..243: mol_type = other RNA

SEQ ID NO: 20808 - RNA, 243 nt, synthetic construct; identical to SEQ ID NO: 19211
  modified_base 1..243: mod_base = OTHER; note = Each t is m1f
  source 1..243: mol_type = other RNA

SEQ ID NO: 20809 - RNA, 243 nt, synthetic construct; identical to SEQ ID NO: 19212
  modified_base 1..243: mod_base = OTHER; note = Each t is m1f
  source 1..243: mol_type = other RNA

SEQ ID NO: 20810 - RNA, 243 nt, synthetic construct; identical to SEQ ID NO: 19213
  modified_base 1..243: mod_base = OTHER; note = Each t is m1f
  source 1..243: mol_type = other RNA

SEQ ID NO: 20811 - RNA, 243 nt, synthetic construct; identical to SEQ ID NO: 19214
  modified_base 1..243: mod_base = OTHER; note = Each t is m1f
  source 1..243: mol_type = other RNA

SEQ ID NO: 20812 - RNA, 243 nt, synthetic construct; identical to SEQ ID NO: 19215
  modified_base 1..243: mod_base = OTHER; note = Each t is m1f
  source 1..243: mol_type = other RNA

SEQ ID NO: 20813 - RNA, 243 nt, synthetic construct; identical to SEQ ID NO: 19216
  modified_base 1..243: mod_base = OTHER; note = Each t is m1f
  source 1..243: mol_type = other RNA

SEQ ID NO: 20814 - RNA, 243 nt, synthetic construct; identical to SEQ ID NO: 19217
  modified_base 1..243: mod_base = OTHER; note = Each t is m1f
  source 1..243: mol_type = other RNA

SEQ ID NO: 20815 - RNA, 243 nt, synthetic construct; identical to SEQ ID NO: 19218
  modified_base 1..243: mod_base = OTHER; note = Each t is m1f
  source 1..243: mol_type = other RNA

SEQ ID NO: 20816 - RNA, 243 nt, synthetic construct; identical to SEQ ID NO: 19219
  modified_base 1..243: mod_base = OTHER; note = Each t is m1f
  source 1..243: mol_type = other RNA

SEQ ID NO: 20817 - RNA, 243 nt, synthetic construct; identical to SEQ ID NO: 19220
  modified_base 1..243: mod_base = OTHER; note = Each t is m1f
  source 1..243: mol_type = other RNA

SEQ ID NO: 20818 - RNA, 243 nt, synthetic construct; identical to SEQ ID NO: 19221
  modified_base 1..243: mod_base = OTHER; note = Each t is m1f
  source 1..243: mol_type = other RNA

SEQ ID NO: 20819 - RNA, 243 nt, synthetic construct; identical to SEQ ID NO: 19222
  modified_base 1..243: mod_base = OTHER; note = Each t is m1f
  source 1..243: mol_type = other RNA

SEQ ID NO: 20820 - RNA, 243 nt, synthetic construct; identical to SEQ ID NO: 19223
  modified_base 1..243: mod_base = OTHER; note = Each t is m1f
  source 1..243: mol_type = other RNA

SEQ ID NO: 20821 - RNA, 243 nt, synthetic construct; identical to SEQ ID NO: 19224
  modified_base 1..243: mod_base = OTHER; note = Each t is m1f
  source 1..243: mol_type = other RNA

SEQ ID NO: 20822 - RNA, 243 nt, synthetic construct; identical to SEQ ID NO: 19225
  modified_base 1..243: mod_base = OTHER; note = Each t is m1f
  source 1..243: mol_type = other RNA

SEQ ID NO: 20823 - RNA, 243 nt, synthetic construct; identical to SEQ ID NO: 19226
  modified_base 1..243: mod_base = OTHER; note = Each t is m1f
  source 1..243: mol_type = other RNA

SEQ ID NO: 20824 - RNA, 243 nt, synthetic construct; identical to SEQ ID NO: 19227
  modified_base 1..243: mod_base = OTHER; note = Each t is m1f
  source 1..243: mol_type = other RNA

SEQ ID NO: 20825 - RNA, 243 nt, synthetic construct; identical to SEQ ID NO: 19228
  modified_base 1..243: mod_base = OTHER; note = Each t is m1f
  source 1..243: mol_type = other RNA

SEQ ID NO: 20826 - RNA, 243 nt, synthetic construct; identical to SEQ ID NO: 19229
  modified_base 1..243: mod_base = OTHER; note = Each t is m1f
  source 1..243: mol_type = other RNA

SEQ ID NO: 20827 - RNA, 243 nt, synthetic construct; identical to SEQ ID NO: 19230
  modified_base 1..243: mod_base = OTHER; note = Each t is m1f
  source 1..243: mol_type = other RNA

SEQ ID NO: 20828 - RNA, 243 nt, synthetic construct; identical to SEQ ID NO: 19231
  modified_base 1..243: mod_base = OTHER; note = Each t is m1f
  source 1..243: mol_type = other RNA

SEQ ID NO: 20829 - RNA, 243 nt, synthetic construct; identical to SEQ ID NO: 19232
  modified_base 1..243: mod_base = OTHER; note = Each t is m1f
  source 1..243: mol_type = other RNA

SEQ ID NO: 20830 - RNA, 243 nt, synthetic construct; identical to SEQ ID NO: 19233
  modified_base 1..243: mod_base = OTHER; note = Each t is m1f
  source 1..243: mol_type = other RNA

SEQ ID NO: 20831 - RNA, 243 nt, synthetic construct; identical to SEQ ID NO: 19234
  modified_base 1..243: mod_base = OTHER; note = Each t is m1f
  source 1..243: mol_type = other RNA

SEQ ID NO: 20832 - RNA, 243 nt, synthetic construct; identical to SEQ ID NO: 19235
  modified_base 1..243: mod_base = OTHER; note = Each t is m1f
  source 1..243: mol_type = other RNA

SEQ ID NO: 20833 - RNA, 243 nt, synthetic construct; identical to SEQ ID NO: 19236
  modified_base 1..243: mod_base = OTHER; note = Each t is m1f
  source 1..243: mol_type = other RNA

SEQ ID NO: 20834 - RNA, 243 nt, synthetic construct; identical to SEQ ID NO: 19237
  modified_base 1..243: mod_base = OTHER; note = Each t is m1f
  source 1..243: mol_type = other RNA

SEQ ID NO: 20835 - RNA, 243 nt, synthetic construct; identical to SEQ ID NO: 19238
  modified_base 1..243: mod_base = OTHER; note = Each t is m1f
  source 1..243: mol_type = other RNA

SEQ ID NO: 20836 - RNA, 243 nt, synthetic construct; identical to SEQ ID NO: 19239
  modified_base 1..243: mod_base = OTHER; note = Each t is m1f
  source 1..243: mol_type = other RNA

SEQ ID NO: 20837 - RNA, 243 nt, synthetic construct; identical to SEQ ID NO: 19240
  modified_base 1..243: mod_base = OTHER; note = Each t is m1f
  source 1..243: mol_type = other RNA

SEQ ID NO: 20838 - RNA, 243 nt, synthetic construct; identical to SEQ ID NO: 19241
  modified_base 1..243: mod_base = OTHER; note = Each t is m1f
  source 1..243: mol_type = other RNA

SEQ ID NO: 20839 - RNA, 243 nt, synthetic construct; identical to SEQ ID NO: 19242
  modified_base 1..243: mod_base = OTHER; note = Each t is m1f
  source 1..243: mol_type = other RNA

SEQ ID NO: 20840 - RNA, 243 nt, synthetic construct; identical to SEQ ID NO: 19243
  modified_base 1..243: mod_base = OTHER; note = Each t is m1f
  source 1..243: mol_type = other RNA

SEQ ID NO: 20841 - RNA, 243 nt, synthetic construct; identical to SEQ ID NO: 19244
  modified_base 1..243: mod_base = OTHER; note = Each t is m1f
  source 1..243: mol_type = other RNA

SEQ ID NO: 20842 - RNA, 243 nt, synthetic construct; identical to SEQ ID NO: 19245
  modified_base 1..243: mod_base = OTHER; note = Each t is m1f
  source 1..243: mol_type = other RNA

SEQ ID NO: 20843 - RNA, 243 nt, synthetic construct; identical to SEQ ID NO: 19246
  modified_base 1..243: mod_base = OTHER; note = Each t is m1f
  source 1..243: mol_type = other RNA

SEQ ID NO: 20844 - RNA, 243 nt, synthetic construct; identical to SEQ ID NO: 19247
  modified_base 1..243: mod_base = OTHER; note = Each t is m1f
  source 1..243: mol_type = other RNA

SEQ ID NO: 20845 - RNA, 243 nt, synthetic construct; identical to SEQ ID NO: 19248
  modified_base 1..243: mod_base = OTHER; note = Each t is m1f
  source 1..243: mol_type = other RNA

SEQ ID NO: 20846 - RNA, 243 nt, synthetic construct; identical to SEQ ID NO: 19249
  modified_base 1..243: mod_base = OTHER; note = Each t is m1f
  source 1..243: mol_type = other RNA

SEQ ID NO: 20847 - RNA, 243 nt, synthetic construct; identical to SEQ ID NO: 19250
  modified_base 1..243: mod_base = OTHER; note = Each t is m1f
  source 1..243: mol_type = other RNA

SEQ ID NO: 20848 - RNA, 243 nt, synthetic construct; identical to SEQ ID NO: 19251
  modified_base 1..243: mod_base = OTHER; note = Each t is m1f
  source 1..243: mol_type = other RNA

SEQ ID NO: 20849 - RNA, 243 nt, synthetic construct; identical to SEQ ID NO: 19252
  modified_base 1..243: mod_base = OTHER; note = Each t is m1f
  source 1..243: mol_type = other RNA

SEQ ID NO: 20850 - RNA, 243 nt, synthetic construct; identical to SEQ ID NO: 19253
  modified_base 1..243: mod_base = OTHER; note = Each t is m1f
  source 1..243: mol_type = other RNA

SEQ ID NO: 20851 - RNA, 243 nt, synthetic construct; identical to SEQ ID NO: 19254
  modified_base 1..243: mod_base = OTHER; note = Each t is m1f
  source 1..243: mol_type = other RNA

SEQ ID NO: 20852 - RNA, 243 nt, synthetic construct; identical to SEQ ID NO: 19255
  modified_base 1..243: mod_base = OTHER; note = Each t is m1f
  source 1..243: mol_type = other RNA

SEQ ID NO: 20853 - RNA, 243 nt, synthetic construct; identical to SEQ ID NO: 19256
  modified_base 1..243: mod_base = OTHER; note = Each t is m1f
  source 1..243: mol_type = other RNA

SEQ ID NO: 20854 - RNA, 243 nt, synthetic construct; identical to SEQ ID NO: 19257
  modified_base 1..243: mod_base = OTHER; note = Each t is m1f
  source 1..243: mol_type = other RNA

SEQ ID NO: 20855 - RNA, 243 nt, synthetic construct; identical to SEQ ID NO: 19258
  modified_base 1..243: mod_base = OTHER; note = Each t is m1f
  source 1..243: mol_type = other RNA

SEQ ID NO: 20856 - RNA, 243 nt, synthetic construct; identical to SEQ ID NO: 19259
  modified_base 1..243: mod_base = OTHER; note = Each t is m1f
  source 1..243: mol_type = other RNA

SEQ ID NO: 20857 - RNA, 243 nt, synthetic construct; identical to SEQ ID NO: 19260
  modified_base 1..243: mod_base = OTHER; note = Each t is m1f
  source 1..243: mol_type = other RNA

SEQ ID NO: 20858 - RNA, 243 nt, synthetic construct; identical to SEQ ID NO: 19261
  modified_base 1..243: mod_base = OTHER; note = Each t is m1f
  source 1..243: mol_type = other RNA

SEQ ID NO: 20859 - RNA, 243 nt, synthetic construct; identical to SEQ ID NO: 19262
  modified_base 1..243: mod_base = OTHER; note = Each t is m1f
  source 1..243: mol_type = other RNA

SEQ ID NO: 20860 - RNA, 243 nt, synthetic construct; identical to SEQ ID NO: 19263
  modified_base 1..243: mod_base = OTHER; note = Each t is m1f
  source 1..243: mol_type = other RNA

SEQ ID NO: 20861 - RNA, 243 nt, synthetic construct; identical to SEQ ID NO: 19264
  modified_base 1..243: mod_base = OTHER; note = Each t is m1f
  source 1..243: mol_type = other RNA

SEQ ID NO: 20862 - RNA, 243 nt, synthetic construct; identical to SEQ ID NO: 19265
  modified_base 1..243: mod_base = OTHER; note = Each t is m1f
  source 1..243: mol_type = other RNA

SEQ ID NO: 20863 - RNA, 243 nt, synthetic construct; identical to SEQ ID NO: 19266
  modified_base 1..243: mod_base = OTHER; note = Each t is m1f
  source 1..243: mol_type = other RNA

SEQ ID NO: 20864 - RNA, 243 nt, synthetic construct; identical to SEQ ID NO: 19267
  modified_base 1..243: mod_base = OTHER; note = Each t is m1f
  source 1..243: mol_type = other RNA

SEQ ID NO: 20865 - RNA, 243 nt, synthetic construct; identical to SEQ ID NO: 19268
  modified_base 1..243: mod_base = OTHER; note = Each t is m1f
  source 1..243: mol_type = other RNA

SEQ ID NO: 20866 - RNA, 243 nt, synthetic construct; identical to SEQ ID NO: 19269
  modified_base 1..243: mod_base = OTHER; note = Each t is m1f
  source 1..243: mol_type = other RNA

SEQ ID NO: 20867 - RNA, 243 nt, synthetic construct; identical to SEQ ID NO: 19270
  modified_base 1..243: mod_base = OTHER; note = Each t is m1f
  source 1..243: mol_type = other RNA

SEQ ID NO: 20868 - RNA, 243 nt, synthetic construct; identical to SEQ ID NO: 19271
  modified_base 1..243: mod_base = OTHER; note = Each t is m1f
  source 1..243: mol_type = other RNA

SEQ ID NO: 20869 - RNA, 243 nt, synthetic construct; identical to SEQ ID NO: 19272
  modified_base 1..243: mod_base = OTHER; note = Each t is m1f
  source 1..243: mol_type = other RNA

SEQ ID NO: 20870 - RNA, 243 nt, synthetic construct; identical to SEQ ID NO: 19273
  modified_base 1..243: mod_base = OTHER; note = Each t is m1f
  source 1..243: mol_type = other RNA

SEQ ID NO: 20871 - RNA, 243 nt, synthetic construct; identical to SEQ ID NO: 19274
  modified_base 1..243: mod_base = OTHER; note = Each t is m1f
  source 1..243: mol_type = other RNA

SEQ ID NO: 20872 - RNA, 243 nt, synthetic construct; identical to SEQ ID NO: 19275
  modified_base 1..243: mod_base = OTHER; note = Each t is m1f
  source 1..243: mol_type = other RNA

SEQ ID NO: 20873 - RNA, 243 nt, synthetic construct; identical to SEQ ID NO: 19276
  modified_base 1..243: mod_base = OTHER; note = Each t is m1f
  source 1..243: mol_type = other RNA

SEQ ID NO: 20874 - RNA, 243 nt, synthetic construct; identical to SEQ ID NO: 19277
  modified_base 1..243: mod_base = OTHER; note = Each t is m1f
  source 1..243: mol_type = other RNA

SEQ ID NO: 20875 - RNA, 243 nt, synthetic construct; identical to SEQ ID NO: 19278
  modified_base 1..243: mod_base = OTHER; note = Each t is m1f
  source 1..243: mol_type = other RNA

SEQ ID NO: 20876 - RNA, 243 nt, synthetic construct; identical to SEQ ID NO: 19279
  modified_base 1..243: mod_base = OTHER; note = Each t is m1f
  source 1..243: mol_type = other RNA

SEQ ID NO: 20877 - RNA, 243 nt, synthetic construct; identical to SEQ ID NO: 19280
  modified_base 1..243: mod_base = OTHER; note = Each t is m1f
  source 1..243: mol_type = other RNA

SEQ ID NO: 20878 - RNA, 243 nt, synthetic construct; identical to SEQ ID NO: 19281
  modified_base 1..243: mod_base = OTHER; note = Each t is m1f
  source 1..243: mol_type = other RNA

SEQ ID NO: 20879 - RNA, 243 nt, synthetic construct; identical to SEQ ID NO: 19282
  modified_base 1..243: mod_base = OTHER; note = Each t is m1f
  source 1..243: mol_type = other RNA

SEQ ID NO: 20880 - RNA, 243 nt, synthetic construct; identical to SEQ ID NO: 19283
  modified_base 1..243: mod_base = OTHER; note = Each t is m1f
  source 1..243: mol_type = other RNA

SEQ ID NO: 20881 - RNA, 243 nt, synthetic construct; identical to SEQ ID NO: 19284
  modified_base 1..243: mod_base = OTHER; note = Each t is m1f
  source 1..243: mol_type = other RNA

SEQ ID NO: 20882 - RNA, 243 nt, synthetic construct; identical to SEQ ID NO: 19285
  modified_base 1..243: mod_base = OTHER; note = Each t is m1f
  source 1..243: mol_type = other RNA

SEQ ID NO: 20883 - RNA, 243 nt, synthetic construct; identical to SEQ ID NO: 19286
  modified_base 1..243: mod_base = OTHER; note = Each t is m1f
  source 1..243: mol_type = other RNA

SEQ ID NO: 20884 - RNA, 243 nt, synthetic construct; identical to SEQ ID NO: 19287
  modified_base 1..243: mod_base = OTHER; note = Each t is m1f
  source 1..243: mol_type = other RNA

SEQ ID NO: 20885 - RNA, 243 nt, synthetic construct; identical to SEQ ID NO: 19288
  modified_base 1..243: mod_base = OTHER; note = Each t is m1f
  source 1..243: mol_type = other RNA

SEQ ID NO: 20886 - RNA, 243 nt, synthetic construct; identical to SEQ ID NO: 19289
  modified_base 1..243: mod_base = OTHER; note = Each t is m1f
  source 1..243: mol_type = other RNA

SEQ ID NO: 20887 - RNA, 243 nt, synthetic construct; identical to SEQ ID NO: 19290
  modified_base 1..243: mod_base = OTHER; note = Each t is m1f
  source 1..243: mol_type = other RNA

SEQ ID NO: 20888 - RNA, 243 nt, synthetic construct; identical to SEQ ID NO: 19291
  modified_base 1..243: mod_base = OTHER; note = Each t is m1f
  source 1..243: mol_type = other RNA

SEQ ID NO: 20889 - RNA, 243 nt, synthetic construct; identical to SEQ ID NO: 19292
  modified_base 1..243: mod_base = OTHER; note = Each t is m1f
  source 1..243: mol_type = other RNA

SEQ ID NO: 20890 - RNA, 243 nt, synthetic construct; identical to SEQ ID NO: 19293
  modified_base 1..243: mod_base = OTHER; note = Each t is m1f
  source 1..243: mol_type = other RNA

SEQ ID NO: 20891 - RNA, 243 nt, synthetic construct; identical to SEQ ID NO: 19294
  modified_base 1..243: mod_base = OTHER; note = Each t is m1f
  source 1..243: mol_type = other RNA

SEQ ID NO: 20892 - RNA, 243 nt, synthetic construct; identical to SEQ ID NO: 19295
  modified_base 1..243: mod_base = OTHER; note = Each t is m1f
  source 1..243: mol_type = other RNA

SEQ ID NO: 20893 - RNA, 243 nt, synthetic construct; identical to SEQ ID NO: 19296
  modified_base 1..243: mod_base = OTHER; note = Each t is m1f
  source 1..243: mol_type = other RNA

SEQ ID NO: 20894 - RNA, 243 nt, synthetic construct; identical to SEQ ID NO: 19297
  modified_base 1..243: mod_base = OTHER; note = Each t is m1f
  source 1..243: mol_type = other RNA

SEQ ID NO: 20895 - RNA, 243 nt, synthetic construct; identical to SEQ ID NO: 19298
  modified_base 1..243: mod_base = OTHER; note = Each t is m1f
  source 1..243: mol_type = other RNA

SEQ ID NO: 20896 - RNA, 243 nt, synthetic construct; identical to SEQ ID NO: 19299
  modified_base 1..243: mod_base = OTHER; note = Each t is m1f
  source 1..243: mol_type = other RNA

SEQ ID NO: 20897 - RNA, 243 nt, synthetic construct; identical to SEQ ID NO: 19300
  modified_base 1..243: mod_base = OTHER; note = Each t is m1f
  source 1..243: mol_type = other RNA

SEQ ID NO: 20898 - RNA, 243 nt, synthetic construct; identical to SEQ ID NO: 19301
  modified_base 1..243: mod_base = OTHER; note = Each t is m1f
  source 1..243: mol_type = other RNA

SEQ ID NO: 20899 - RNA, 243 nt, synthetic construct; identical to SEQ ID NO: 19302
  modified_base 1..243: mod_base = OTHER; note = Each t is m1f
  source 1..243: mol_type = other RNA

SEQ ID NO: 20900 - RNA, 243 nt, synthetic construct; identical to SEQ ID NO: 19303
  modified_base 1..243: mod_base = OTHER; note = Each t is m1f
  source 1..243: mol_type = other RNA

SEQ ID NO: 20901 - RNA, 243 nt, synthetic construct; identical to SEQ ID NO: 19304
  modified_base 1..243: mod_base = OTHER; note = Each t is m1f
  source 1..243: mol_type = other RNA

SEQ ID NO: 20902 - RNA, 243 nt, synthetic construct; identical to SEQ ID NO: 19305
  modified_base 1..243: mod_base = OTHER; note = Each t is m1f
  source 1..243: mol_type = other RNA

SEQ ID NO: 20903 - RNA, 243 nt, synthetic construct; identical to SEQ ID NO: 19306
  modified_base 1..243: mod_base = OTHER; note = Each t is m1f
  source 1..243: mol_type = other RNA

SEQ ID NO: 20904 - RNA, 243 nt, synthetic construct; identical to SEQ ID NO: 19307
  modified_base 1..243: mod_base = OTHER; note = Each t is m1f
  source 1..243: mol_type = other RNA

SEQ ID NO: 20905 - RNA, 243 nt, synthetic construct; identical to SEQ ID NO: 19308
  modified_base 1..243: mod_base = OTHER; note = Each t is m1f
  source 1..243: mol_type = other RNA

SEQ ID NO: 20906 - RNA, 243 nt, synthetic construct; identical to SEQ ID NO: 19309
  modified_base 1..243: mod_base = OTHER; note = Each t is m1f
  source 1..243: mol_type = other RNA

SEQ ID NO: 20907 - RNA, 243 nt, synthetic construct; identical to SEQ ID NO: 19310
  modified_base 1..243: mod_base = OTHER; note = Each t is m1f
  source 1..243: mol_type = other RNA

SEQ ID NO: 20908 - RNA, 243 nt, synthetic construct; identical to SEQ ID NO: 19311
  modified_base 1..243: mod_base = OTHER; note = Each t is m1f
  source 1..243: mol_type = other RNA

SEQ ID NO: 20909 - RNA, 243 nt, synthetic construct; identical to SEQ ID NO: 19312
  modified_base 1..243: mod_base = OTHER; note = Each t is m1f
  source 1..243: mol_type = other RNA

SEQ ID NO: 20910 - RNA, 243 nt, synthetic construct; identical to SEQ ID NO: 19313
  modified_base 1..243: mod_base = OTHER; note = Each t is m1f
  source 1..243: mol_type = other RNA

SEQ ID NO: 20911 - RNA, 243 nt, synthetic construct; identical to SEQ ID NO: 19314
  modified_base 1..243: mod_base = OTHER; note = Each t is m1f
  source 1..243: mol_type = other RNA

SEQ ID NO: 20912 - RNA, 243 nt, synthetic construct; identical to SEQ ID NO: 19315
  modified_base 1..243: mod_base = OTHER; note = Each t is m1f
  source 1..243: mol_type = other RNA

SEQ ID NO: 20913 - RNA, 243 nt, synthetic construct; identical to SEQ ID NO: 19316
  modified_base 1..243: mod_base = OTHER; note = Each t is m1f
  source 1..243: mol_type = other RNA

SEQ ID NO: 20914 - RNA, 243 nt, synthetic construct; identical to SEQ ID NO: 19317
  modified_base 1..243: mod_base = OTHER; note = Each t is m1f
  source 1..243: mol_type = other RNA

SEQ ID NO: 20915 - RNA, 243 nt, synthetic construct; identical to SEQ ID NO: 19318
  modified_base 1..243: mod_base = OTHER; note = Each t is m1f
  source 1..243: mol_type = other RNA

SEQ ID NO: 20916 - RNA, 243 nt, synthetic construct; identical to SEQ ID NO: 19319
  modified_base 1..243: mod_base = OTHER; note = Each t is m1f
  source 1..243: mol_type = other RNA

SEQ ID NO: 20917 - RNA, 243 nt, synthetic construct; identical to SEQ ID NO: 19320
  modified_base 1..243: mod_base = OTHER; note = Each t is m1f
  source 1..243: mol_type = other RNA

SEQ ID NO: 20918 - RNA, 243 nt, synthetic construct; identical to SEQ ID NO: 19321
  modified_base 1..243: mod_base = OTHER; note = Each t is m1f
  source 1..243: mol_type = other RNA

SEQ ID NO: 20919 - RNA, 243 nt, synthetic construct; identical to SEQ ID NO: 19322
  modified_base 1..243: mod_base = OTHER; note = Each t is m1f
  source 1..243: mol_type = other RNA

SEQ ID NO: 20920 - RNA, 243 nt, synthetic construct; identical to SEQ ID NO: 19323
  modified_base 1..243: mod_base = OTHER; note = Each t is m1f
  source 1..243: mol_type = other RNA

SEQ ID NO: 20921 - RNA, 243 nt, synthetic construct; identical to SEQ ID NO: 19324
  modified_base 1..243: mod_base = OTHER; note = Each t is m1f
  source 1..243: mol_type = other RNA

SEQ ID NO: 20922 - RNA, 243 nt, synthetic construct; identical to SEQ ID NO: 19325
  modified_base 1..243: mod_base = OTHER; note = Each t is m1f
  source 1..243: mol_type = other RNA

SEQ ID NO: 20923 - RNA, 243 nt, synthetic construct; identical to SEQ ID NO: 19326
  modified_base 1..243: mod_base = OTHER; note = Each t is m1f
  source 1..243: mol_type = other RNA

SEQ ID NO: 20924 - RNA, 243 nt, synthetic construct; identical to SEQ ID NO: 19327
  modified_base 1..243: mod_base = OTHER; note = Each t is m1f
  source 1..243: mol_type = other RNA

SEQ ID NO: 20925 - RNA, 243 nt, synthetic construct; identical to SEQ ID NO: 19328
  modified_base 1..243: mod_base = OTHER; note = Each t is m1f
  source 1..243: mol_type = other RNA

SEQ ID NO: 20926 - RNA, 243 nt, synthetic construct; identical to SEQ ID NO: 19329
  modified_base 1..243: mod_base = OTHER; note = Each t is m1f
  source 1..243: mol_type = other RNA

SEQ ID NO: 20927 - RNA, 243 nt, synthetic construct; identical to SEQ ID NO: 19330
  modified_base 1..243: mod_base = OTHER; note = Each t is m1f
  source 1..243: mol_type = other RNA

SEQ ID NO: 20928 - RNA, 243 nt, synthetic construct; identical to SEQ ID NO: 19331
  modified_base 1..243: mod_base = OTHER; note = Each t is m1f
  source 1..243: mol_type = other RNA

SEQ ID NO: 20929 - RNA, 243 nt, synthetic construct; identical to SEQ ID NO: 19332
  modified_base 1..243: mod_base = OTHER; note = Each t is m1f
  source 1..243: mol_type = other RNA

SEQ ID NO: 20930 - RNA, 243 nt, synthetic construct; identical to SEQ ID NO: 19333
  modified_base 1..243: mod_base = OTHER; note = Each t is m1f
  source 1..243: mol_type = other RNA

SEQ ID NO: 20931 - RNA, 243 nt, synthetic construct; identical to SEQ ID NO: 19334
  modified_base 1..243: mod_base = OTHER; note = Each t is m1f
  source 1..243: mol_type = other RNA

SEQ ID NO: 20932 - RNA, 243 nt, synthetic construct; identical to SEQ ID NO: 19335
  modified_base 1..243: mod_base = OTHER; note = Each t is m1f
  source 1..243: mol_type = other RNA

SEQ ID NO: 20933 - RNA, 243 nt, synthetic construct; identical to SEQ ID NO: 19336
  modified_base 1..243: mod_base = OTHER; note = Each t is m1f
  source 1..243: mol_type = other RNA

SEQ ID NO: 20934 - RNA, 243 nt, synthetic construct; identical to SEQ ID NO: 19337
  modified_base 1..243: mod_base = OTHER; note = Each t is m1f
  source 1..243: mol_type = other RNA

SEQ ID NO: 20935 - RNA, 243 nt, synthetic construct; identical to SEQ ID NO: 19338
  modified_base 1..243: mod_base = OTHER; note = Each t is m1f
  source 1..243: mol_type = other RNA

SEQ ID NO: 20936 - RNA, 243 nt, synthetic construct; identical to SEQ ID NO: 19339
  modified_base 1..243: mod_base = OTHER; note = Each t is m1f
  source 1..243: mol_type = other RNA

SEQ ID NO: 20937 - RNA, 243 nt, synthetic construct; identical to SEQ ID NO: 19340
  modified_base 1..243: mod_base = OTHER; note = Each t is m1f
  source 1..243: mol_type = other RNA

SEQ ID NO: 20938 - RNA, 243 nt, synthetic construct; identical to SEQ ID NO: 19341
  modified_base 1..243: mod_base = OTHER; note = Each t is m1f
  source 1..243: mol_type = other RNA

SEQ ID NO: 20939 - RNA, 243 nt, synthetic construct; identical to SEQ ID NO: 19342
  modified_base 1..243: mod_base = OTHER; note = Each t is m1f
  source 1..243: mol_type = other RNA

SEQ ID NO: 20940 - RNA, 243 nt, synthetic construct; identical to SEQ ID NO: 19343
  modified_base 1..243: mod_base = OTHER; note = Each t is m1f
  source 1..243: mol_type = other RNA

SEQ ID NO: 20941 - RNA, 243 nt, synthetic construct; identical to SEQ ID NO: 19344
  modified_base 1..243: mod_base = OTHER; note = Each t is m1f
  source 1..243: mol_type = other RNA

SEQ ID NO: 20942 - RNA, 243 nt, synthetic construct; identical to SEQ ID NO: 19345
  modified_base 1..243: mod_base = OTHER; note = Each t is m1f
  source 1..243: mol_type = other RNA

SEQ ID NO: 20943 - RNA, 243 nt, synthetic construct; identical to SEQ ID NO: 19346
  modified_base 1..243: mod_base = OTHER; note = Each t is m1f
  source 1..243: mol_type = other RNA

SEQ ID NO: 20944 - RNA, 243 nt, synthetic construct; identical to SEQ ID NO: 19347
  modified_base 1..243: mod_base = OTHER; note = Each t is m1f
  source 1..243: mol_type = other RNA

SEQ ID NO: 20945 - RNA, 243 nt, synthetic construct; identical to SEQ ID NO: 19348
  modified_base 1..243: mod_base = OTHER; note = Each t is m1f
  source 1..243: mol_type = other RNA

SEQ ID NO: 20946 - RNA, 243 nt, synthetic construct; identical to SEQ ID NO: 19349
  modified_base 1..243: mod_base = OTHER; note = Each t is m1f
  source 1..243: mol_type = other RNA

SEQ ID NO: 20947 - RNA, 243 nt, synthetic construct; identical to SEQ ID NO: 19350
  modified_base 1..243: mod_base = OTHER; note = Each t is m1f
  source 1..243: mol_type = other RNA

SEQ ID NO: 20948 - RNA, 243 nt, synthetic construct; identical to SEQ ID NO: 19351
  modified_base 1..243: mod_base = OTHER; note = Each t is m1f
  source 1..243: mol_type = other RNA

SEQ ID NO: 20949 - RNA, 243 nt, synthetic construct; identical to SEQ ID NO: 19352
  modified_base 1..243: mod_base = OTHER; note = Each t is m1f
  source 1..243: mol_type = other RNA

SEQ ID NO: 20950 - RNA, 243 nt, synthetic construct; identical to SEQ ID NO: 19353
  modified_base 1..243: mod_base = OTHER; note = Each t is m1f
  source 1..243: mol_type = other RNA

SEQ ID NO: 20951 - RNA, 243 nt, synthetic construct; identical to SEQ ID NO: 19354
  modified_base 1..243: mod_base = OTHER; note = Each t is m1f
  source 1..243: mol_type = other RNA

SEQ ID NO: 20952 - RNA, 243 nt, synthetic construct; identical to SEQ ID NO: 19355
  modified_base 1..243: mod_base = OTHER; note = Each t is m1f
  source 1..243: mol_type = other RNA

SEQ ID NO: 20953 - RNA, 243 nt, synthetic construct; identical to SEQ ID NO: 19356
  modified_base 1..243: mod_base = OTHER; note = Each t is m1f
  source 1..243: mol_type = other RNA

SEQ ID NO: 20954 - RNA, 243 nt, synthetic construct; identical to SEQ ID NO: 19357
  modified_base 1..243: mod_base = OTHER; note = Each t is m1f
  source 1..243: mol_type = other RNA

SEQ ID NO: 20955 - RNA, 243 nt, synthetic construct; identical to SEQ ID NO: 19358
  modified_base 1..243: mod_base = OTHER; note = Each t is m1f
  source 1..243: mol_type = other RNA

SEQ ID NO: 20956 - RNA, 243 nt, synthetic construct; identical to SEQ ID NO: 19359
  modified_base 1..243: mod_base = OTHER; note = Each t is m1f
  source 1..243: mol_type = other RNA

SEQ ID NO: 20957 - RNA, 243 nt, synthetic construct; identical to SEQ ID NO: 19360
  modified_base 1..243: mod_base = OTHER; note = Each t is m1f
  source 1..243: mol_type = other RNA

SEQ ID NO: 20958 - RNA, 243 nt, synthetic construct; identical to SEQ ID NO: 19361
  modified_base 1..243: mod_base = OTHER; note = Each t is m1f
  source 1..243: mol_type = other RNA

SEQ ID NO: 20959 - RNA, 243 nt, synthetic construct; identical to SEQ ID NO: 19362
  modified_base 1..243: mod_base = OTHER; note = Each t is m1f
  source 1..243: mol_type = other RNA

SEQ ID NO: 20960 - RNA, 243 nt, synthetic construct; identical to SEQ ID NO: 19363
  modified_base 1..243: mod_base = OTHER; note = Each t is m1f
  source 1..243: mol_type = other RNA

SEQ ID NO: 20961 - RNA, 243 nt, synthetic construct; identical to SEQ ID NO: 19364
  modified_base 1..243: mod_base = OTHER; note = Each t is m1f
  source 1..243: mol_type = other RNA

SEQ ID NO: 20962 - RNA, 243 nt, synthetic construct; identical to SEQ ID NO: 19365
  modified_base 1..243: mod_base = OTHER; note = Each t is m1f
  source 1..243: mol_type = other RNA

SEQ ID NO: 20963 - RNA, 243 nt, synthetic construct; identical to SEQ ID NO: 19366
  modified_base 1..243: mod_base = OTHER; note = Each t is m1f
  source 1..243: mol_type = other RNA

SEQ ID NO: 20964 - RNA, 243 nt, synthetic construct; identical to SEQ ID NO: 19367
  modified_base 1..243: mod_base = OTHER; note = Each t is m1f
  source 1..243: mol_type = other RNA

SEQ ID NO: 20965 - RNA, 243 nt, synthetic construct; identical to SEQ ID NO: 19368
  modified_base 1..243: mod_base = OTHER; note = Each t is m1f
  source 1..243: mol_type = other RNA

SEQ ID NO: 20966 - RNA, 243 nt, synthetic construct; identical to SEQ ID NO: 19369
  modified_base 1..243: mod_base = OTHER; note = Each t is m1f
  source 1..243: mol_type = other RNA

SEQ ID NO: 20967 - RNA, 243 nt, synthetic construct; identical to SEQ ID NO: 19370
  modified_base 1..243: mod_base = OTHER; note = Each t is m1f
  source 1..243: mol_type = other RNA

SEQ ID NO: 20968 - RNA, 243 nt, synthetic construct; identical to SEQ ID NO: 19371
  modified_base 1..243: mod_base = OTHER; note = Each t is m1f
  source 1..243: mol_type = other RNA

SEQ ID NO: 20969 - RNA, 243 nt, synthetic construct; identical to SEQ ID NO: 19372
  modified_base 1..243: mod_base = OTHER; note = Each t is m1f
  source 1..243: mol_type = other RNA

SEQ ID NO: 20970 - RNA, 243 nt, synthetic construct; identical to SEQ ID NO: 19373
  modified_base 1..243: mod_base = OTHER; note = Each t is m1f
  source 1..243: mol_type = other RNA

SEQ ID NO: 20971 - RNA, 243 nt, synthetic construct; identical to SEQ ID NO: 19374
  modified_base 1..243: mod_base = OTHER; note = Each t is m1f
  source 1..243: mol_type = other RNA

SEQ ID NO: 20972 - RNA, 243 nt, synthetic construct; identical to SEQ ID NO: 19375
  modified_base 1..243: mod_base = OTHER; note = Each t is m1f
  source 1..243: mol_type = other RNA

SEQ ID NO: 20973 - RNA, 243 nt, synthetic construct; identical to SEQ ID NO: 19376
  modified_base 1..243: mod_base = OTHER; note = Each t is m1f
  source 1..243: mol_type = other RNA

SEQ ID NO: 20974 - RNA, 243 nt, synthetic construct; identical to SEQ ID NO: 19377
  modified_base 1..243: mod_base = OTHER; note = Each t is m1f
  source 1..243: mol_type = other RNA

SEQ ID NO: 20975 - RNA, 243 nt, synthetic construct; identical to SEQ ID NO: 19378
  modified_base 1..243: mod_base = OTHER; note = Each t is m1f
  source 1..243: mol_type = other RNA

SEQ ID NO: 20976 - RNA, 243 nt, synthetic construct; identical to SEQ ID NO: 19379
  modified_base 1..243: mod_base = OTHER; note = Each t is m1f
  source 1..243: mol_type = other RNA

SEQ ID NO: 20977 - RNA, 243 nt, synthetic construct; identical to SEQ ID NO: 19380
  modified_base 1..243: mod_base = OTHER; note = Each t is m1f
  source 1..243: mol_type = other RNA

SEQ ID NO: 20978 - RNA, 243 nt, synthetic construct; identical to SEQ ID NO: 19381
  modified_base 1..243: mod_base = OTHER; note = Each t is m1f
  source 1..243: mol_type = other RNA

SEQ ID NO: 20979 - RNA, 243 nt, synthetic construct; identical to SEQ ID NO: 19382
  modified_base 1..243: mod_base = OTHER; note = Each t is m1f
  source 1..243: mol_type = other RNA

SEQ ID NO: 20980 - RNA, 243 nt, synthetic construct; identical to SEQ ID NO: 19383
  modified_base 1..243: mod_base = OTHER; note = Each t is m1f
  source 1..243: mol_type = other RNA

SEQ ID NO: 20981 - RNA, 243 nt, synthetic construct; identical to SEQ ID NO: 19384
  modified_base 1..243: mod_base = OTHER; note = Each t is m1f
  source 1..243: mol_type = other RNA

SEQ ID NO: 20982 - RNA, 243 nt, synthetic construct; identical to SEQ ID NO: 19385
  modified_base 1..243: mod_base = OTHER; note = Each t is m1f
  source 1..243: mol_type = other RNA

SEQ ID NO: 20983 - RNA, 243 nt, synthetic construct; identical to SEQ ID NO: 19386
  modified_base 1..243: mod_base = OTHER; note = Each t is m1f
  source 1..243: mol_type = other RNA

SEQ ID NO: 20984 - RNA, 243 nt, synthetic construct; identical to SEQ ID NO: 19387
  modified_base 1..243: mod_base = OTHER; note = Each t is m1f
  source 1..243: mol_type = other RNA

SEQ ID NO: 20985 - RNA, 243 nt, synthetic construct; identical to SEQ ID NO: 19388
  modified_base 1..243: mod_base = OTHER; note = Each t is m1f
  source 1..243: mol_type = other RNA

SEQ ID NO: 20986 - RNA, 243 nt, synthetic construct; identical to SEQ ID NO: 19389
  modified_base 1..243: mod_base = OTHER; note = Each t is m1f
  source 1..243: mol_type = other RNA

SEQ ID NO: 20987 - RNA, 243 nt, synthetic construct; identical to SEQ ID NO: 19390
  modified_base 1..243: mod_base = OTHER; note = Each t is m1f
  source 1..243: mol_type = other RNA

SEQ ID NO: 20988 - RNA, 243 nt, synthetic construct; identical to SEQ ID NO: 19391
  modified_base 1..243: mod_base = OTHER; note = Each t is m1f
  source 1..243: mol_type = other RNA

SEQ ID NO: 20989 - RNA, 243 nt, synthetic construct; identical to SEQ ID NO: 19392
  modified_base 1..243: mod_base = OTHER; note = Each t is m1f
  source 1..243: mol_type = other RNA

SEQ ID NO: 20990 - RNA, 243 nt, synthetic construct; identical to SEQ ID NO: 19393
  modified_base 1..243: mod_base = OTHER; note = Each t is m1f
  source 1..243: mol_type = other RNA

SEQ ID NO: 20991 - RNA, 243 nt, synthetic construct; identical to SEQ ID NO: 19394
  modified_base 1..243: mod_base = OTHER; note = Each t is m1f
  source 1..243: mol_type = other RNA

SEQ ID NO: 20992 - RNA, 243 nt, synthetic construct; identical to SEQ ID NO: 19395
  modified_base 1..243: mod_base = OTHER; note = Each t is m1f
  source 1..243: mol_type = other RNA

SEQ ID NO: 20993 - RNA, 243 nt, synthetic construct; identical to SEQ ID NO: 19396
  modified_base 1..243: mod_base = OTHER; note = Each t is m1f
  source 1..243: mol_type = other RNA

SEQ ID NO: 20994 - RNA, 243 nt, synthetic construct; identical to SEQ ID NO: 19397
  modified_base 1..243: mod_base = OTHER; note = Each t is m1f
  source 1..243: mol_type = other RNA

SEQ ID NO: 20995 - RNA, 243 nt, synthetic construct; identical to SEQ ID NO: 19398
  modified_base 1..243: mod_base = OTHER; note = Each t is m1f
  source 1..243: mol_type = other RNA

SEQ ID NO: 20996 - RNA, 243 nt, synthetic construct; identical to SEQ ID NO: 19399
  modified_base 1..243: mod_base = OTHER; note = Each t is m1f
  source 1..243: mol_type = other RNA

SEQ ID NO: 20997 - RNA, 243 nt, synthetic construct; identical to SEQ ID NO: 19400
  modified_base 1..243: mod_base = OTHER; note = Each t is m1f
  source 1..243: mol_type = other RNA

SEQ ID NO: 20998 - RNA, 243 nt, synthetic construct; identical to SEQ ID NO: 19401
  modified_base 1..243: mod_base = OTHER; note = Each t is m1f
  source 1..243: mol_type = other RNA

SEQ ID NO: 20999 - RNA, 243 nt, synthetic construct; identical to SEQ ID NO: 19402
  modified_base 1..243: mod_base = OTHER; note = Each t is m1f
  source 1..243: mol_type = other RNA

SEQ ID NO: 21000 - RNA, 243 nt, synthetic construct; identical to SEQ ID NO: 19403
  modified_base 1..243: mod_base = OTHER; note = Each t is m1f
  source 1..243: mol_type = other RNA

SEQ ID NO: 21001 - RNA, 243 nt, synthetic construct; identical to SEQ ID NO: 19404
  modified_base 1..243: mod_base = OTHER; note = Each t is m1f
  source 1..243: mol_type = other RNA

SEQ ID NO: 21002 - RNA, 243 nt, synthetic construct; identical to SEQ ID NO: 19405
  modified_base 1..243: mod_base = OTHER; note = Each t is m1f
  source 1..243: mol_type = other RNA

SEQ ID NO: 21003 - RNA, 243 nt, synthetic construct; identical to SEQ ID NO: 19406
  modified_base 1..243: mod_base = OTHER; note = Each t is m1f
  source 1..243: mol_type = other RNA

SEQ ID NO: 21004 - RNA, 243 nt, synthetic construct; identical to SEQ ID NO: 19407
  modified_base 1..243: mod_base = OTHER; note = Each t is m1f
  source 1..243: mol_type = other RNA

SEQ ID NO: 21005 - RNA, 243 nt, synthetic construct; identical to SEQ ID NO: 19408
  modified_base 1..243: mod_base = OTHER; note = Each t is m1f
  source 1..243: mol_type = other RNA

SEQ ID NO: 21006 - RNA, 243 nt, synthetic construct; identical to SEQ ID NO: 19409
  modified_base 1..243: mod_base = OTHER; note = Each t is m1f
  source 1..243: mol_type = other RNA

SEQ ID NO: 21007 - RNA, 243 nt, synthetic construct; identical to SEQ ID NO: 19410
  modified_base 1..243: mod_base = OTHER; note = Each t is m1f
  source 1..243: mol_type = other RNA

SEQ ID NO: 21008 - RNA, 243 nt, synthetic construct; identical to SEQ ID NO: 19411
  modified_base 1..243: mod_base = OTHER; note = Each t is m1f
  source 1..243: mol_type = other RNA

SEQ ID NO: 21009 - RNA, 243 nt, synthetic construct; identical to SEQ ID NO: 19412
  modified_base 1..243: mod_base = OTHER; note = Each t is m1f
  source 1..243: mol_type = other RNA

SEQ ID NO: 21010 - RNA, 243 nt, synthetic construct; identical to SEQ ID NO: 19413
  modified_base 1..243: mod_base = OTHER; note = Each t is m1f
  source 1..243: mol_type = other RNA

SEQ ID NO: 21011 - RNA, 243 nt, synthetic construct; identical to SEQ ID NO: 19414
  modified_base 1..243: mod_base = OTHER; note = Each t is m1f
  source 1..243: mol_type = other RNA

SEQ ID NO: 21012 - RNA, 243 nt, synthetic construct; identical to SEQ ID NO: 19415
  modified_base 1..243: mod_base = OTHER; note = Each t is m1f
  source 1..243: mol_type = other RNA

SEQ ID NO: 21013 - RNA, 243 nt, synthetic construct; identical to SEQ ID NO: 19416
  modified_base 1..243: mod_base = OTHER; note = Each t is m1f
  source 1..243: mol_type = other RNA

SEQ ID NO: 21014 - RNA, 243 nt, synthetic construct; identical to SEQ ID NO: 19417
  modified_base 1..243: mod_base = OTHER; note = Each t is m1f
  source 1..243: mol_type = other RNA

SEQ ID NO: 21015 - RNA, 243 nt, synthetic construct; identical to SEQ ID NO: 19418
  modified_base 1..243: mod_base = OTHER; note = Each t is m1f
  source 1..243: mol_type = other RNA

SEQ ID NO: 21016 - RNA, 243 nt, synthetic construct; identical to SEQ ID NO: 19419
  modified_base 1..243: mod_base = OTHER; note = Each t is m1f
  source 1..243: mol_type = other RNA

SEQ ID NO: 21017 - RNA, 243 nt, synthetic construct; identical to SEQ ID NO: 19420
  modified_base 1..243: mod_base = OTHER; note = Each t is m1f
  source 1..243: mol_type = other RNA

SEQ ID NO: 21018 - RNA, 243 nt, synthetic construct; identical to SEQ ID NO: 19421
  modified_base 1..243: mod_base = OTHER; note = Each t is m1f
  source 1..243: mol_type = other RNA

SEQ ID NO: 21019 - RNA, 243 nt, synthetic construct; identical to SEQ ID NO: 19422
  modified_base 1..243: mod_base = OTHER; note = Each t is m1f
  source 1..243: mol_type = other RNA

SEQ ID NO: 21020 - RNA, 243 nt, synthetic construct; identical to SEQ ID NO: 19423
  modified_base 1..243: mod_base = OTHER; note = Each t is m1f
  source 1..243: mol_type = other RNA

SEQ ID NO: 21021 - RNA, 243 nt, synthetic construct; identical to SEQ ID NO: 19424
  modified_base 1..243: mod_base = OTHER; note = Each t is m1f
  source 1..243: mol_type = other RNA

SEQ ID NO: 21022 - RNA, 243 nt, synthetic construct; identical to SEQ ID NO: 19425
  modified_base 1..243: mod_base = OTHER; note = Each t is m1f
  source 1..243: mol_type = other RNA

SEQ ID NO: 21023 - RNA, 243 nt, synthetic construct; identical to SEQ ID NO: 19426
  modified_base 1..243: mod_base = OTHER; note = Each t is m1f
  source 1..243: mol_type = other RNA

SEQ ID NO: 21024 - RNA, 243 nt, synthetic construct; identical to SEQ ID NO: 19427
  modified_base 1..243: mod_base = OTHER; note = Each t is m1f
  source 1..243: mol_type = other RNA

SEQ ID NO: 21025 - RNA, 243 nt, synthetic construct; identical to SEQ ID NO: 19428
  modified_base 1..243: mod_base = OTHER; note = Each t is m1f
  source 1..243: mol_type = other RNA

SEQ ID NO: 21026 - RNA, 243 nt, synthetic construct; identical to SEQ ID NO: 19429
  modified_base 1..243: mod_base = OTHER; note = Each t is m1f
  source 1..243: mol_type = other RNA

SEQ ID NO: 21027 - RNA, 243 nt, synthetic construct; identical to SEQ ID NO: 19430
  modified_base 1..243: mod_base = OTHER; note = Each t is m1f
  source 1..243: mol_type = other RNA

SEQ ID NO: 21028 - RNA, 243 nt, synthetic construct; identical to SEQ ID NO: 19431
  modified_base 1..243: mod_base = OTHER; note = Each t is m1f
  source 1..243: mol_type = other RNA

SEQ ID NO: 21029 - RNA, 243 nt, synthetic construct; identical to SEQ ID NO: 19432
  modified_base 1..243: mod_base = OTHER; note = Each t is m1f
  source 1..243: mol_type = other RNA

SEQ ID NO: 21030 - RNA, 243 nt, synthetic construct; identical to SEQ ID NO: 19433
  modified_base 1..243: mod_base = OTHER; note = Each t is m1f
  source 1..243: mol_type = other RNA

SEQ ID NO: 21031 - RNA, 243 nt, synthetic construct; identical to SEQ ID NO: 19434
  modified_base 1..243: mod_base = OTHER; note = Each t is m1f
  source 1..243: mol_type = other RNA

SEQ ID NO: 21032 - RNA, 243 nt, synthetic construct; identical to SEQ ID NO: 19435
  modified_base 1..243: mod_base = OTHER; note = Each t is m1f
  source 1..243: mol_type = other RNA

SEQ ID NO: 21033 - RNA, 243 nt, synthetic construct; identical to SEQ ID NO: 19436
  modified_base 1..243: mod_base = OTHER; note = Each t is m1f
  source 1..243: mol_type = other RNA

SEQ ID NO: 21034 - RNA, 243 nt, synthetic construct; identical to SEQ ID NO: 19437
  modified_base 1..243: mod_base = OTHER; note = Each t is m1f
  source 1..243: mol_type = other RNA

SEQ ID NO: 21035 - RNA, 243 nt, synthetic construct; identical to SEQ ID NO: 19438
  modified_base 1..243: mod_base = OTHER; note = Each t is m1f
  source 1..243: mol_type = other RNA

SEQ ID NO: 21036 - RNA, 243 nt, synthetic construct; identical to SEQ ID NO: 19439
  modified_base 1..243: mod_base = OTHER; note = Each t is m1f
  source 1..243: mol_type = other RNA

SEQ ID NO: 21037 - RNA, 243 nt, synthetic construct; identical to SEQ ID NO: 19440
  modified_base 1..243: mod_base = OTHER; note = Each t is m1f
  source 1..243: mol_type = other RNA

SEQ ID NO: 21038 - RNA, 243 nt, synthetic construct; identical to SEQ ID NO: 19441
  modified_base 1..243: mod_base = OTHER; note = Each t is m1f
  source 1..243: mol_type = other RNA

SEQ ID NO: 21039 - RNA, 243 nt, synthetic construct; identical to SEQ ID NO: 19442
  modified_base 1..243: mod_base = OTHER; note = Each t is m1f
  source 1..243: mol_type = other RNA

SEQ ID NO: 21040 - RNA, 243 nt, synthetic construct; identical to SEQ ID NO: 19443
  modified_base 1..243: mod_base = OTHER; note = Each t is m1f
  source 1..243: mol_type = other RNA

SEQ ID NO: 21041 - RNA, 243 nt, synthetic construct; identical to SEQ ID NO: 19444
  modified_base 1..243: mod_base = OTHER; note = Each t is m1f
  source 1..243: mol_type = other RNA

SEQ ID NO: 21042 - RNA, 243 nt, synthetic construct; identical to SEQ ID NO: 19445
  modified_base 1..243: mod_base = OTHER; note = Each t is m1f
  source 1..243: mol_type = other RNA

SEQ ID NO: 21043 - RNA, 243 nt, synthetic construct; identical to SEQ ID NO: 19446
  modified_base 1..243: mod_base = OTHER; note = Each t is m1f
  source 1..243: mol_type = other RNA

SEQ ID NO: 21044 - RNA, 243 nt, synthetic construct; identical to SEQ ID NO: 19447
  modified_base 1..243: mod_base = OTHER; note = Each t is m1f
  source 1..243: mol_type = other RNA

SEQ ID NO: 21045 - RNA, 243 nt, synthetic construct; identical to SEQ ID NO: 19448
  modified_base 1..243: mod_base = OTHER; note = Each t is m1f
  source 1..243: mol_type = other RNA

SEQ ID NO: 21046 - RNA, 243 nt, synthetic construct; identical to SEQ ID NO: 19449
  modified_base 1..243: mod_base = OTHER; note = Each t is m1f
  source 1..243: mol_type = other RNA

SEQ ID NO: 21047 - RNA, 243 nt, synthetic construct; identical to SEQ ID NO: 19450
  modified_base 1..243: mod_base = OTHER; note = Each t is m1f
  source 1..243: mol_type = other RNA

SEQ ID NO: 21048 - RNA, 243 nt, synthetic construct; identical to SEQ ID NO: 19451
  modified_base 1..243: mod_base = OTHER; note = Each t is m1f
  source 1..243: mol_type = other RNA

SEQ ID NO: 21049 - RNA, 243 nt, synthetic construct; identical to SEQ ID NO: 19452
  modified_base 1..243: mod_base = OTHER; note = Each t is m1f
  source 1..243: mol_type = other RNA

SEQ ID NO: 21050 - RNA, 243 nt, synthetic construct; identical to SEQ ID NO: 19453
  modified_base 1..243: mod_base = OTHER; note = Each t is m1f
  source 1..243: mol_type = other RNA

SEQ ID NO: 21051 - RNA, 243 nt, synthetic construct; identical to SEQ ID NO: 19454
  modified_base 1..243: mod_base = OTHER; note = Each t is m1f
  source 1..243: mol_type = other RNA

SEQ ID NO: 21052 - RNA, 243 nt, synthetic construct; identical to SEQ ID NO: 19455
  modified_base 1..243: mod_base = OTHER; note = Each t is m1f
  source 1..243: mol_type = other RNA

SEQ ID NO: 21053 - RNA, 243 nt, synthetic construct; identical to SEQ ID NO: 19456
  modified_base 1..243: mod_base = OTHER; note = Each t is m1f
  source 1..243: mol_type = other RNA

SEQ ID NO: 21054 - RNA, 243 nt, synthetic construct; identical to SEQ ID NO: 19457
  modified_base 1..243: mod_base = OTHER; note = Each t is m1f
  source 1..243: mol_type = other RNA

SEQ ID NO: 21055 - RNA, 243 nt, synthetic construct; identical to SEQ ID NO: 19458
  modified_base 1..243: mod_base = OTHER; note = Each t is m1f
  source 1..243: mol_type = other RNA

SEQ ID NO: 21056 - RNA, 243 nt, synthetic construct; identical to SEQ ID NO: 19459
  modified_base 1..243: mod_base = OTHER; note = Each t is m1f
  source 1..243: mol_type = other RNA

SEQ ID NO: 21057 - RNA, 243 nt, synthetic construct; identical to SEQ ID NO: 19460
  modified_base 1..243: mod_base = OTHER; note = Each t is m1f
  source 1..243: mol_type = other RNA

SEQ ID NO: 21058 - RNA, 243 nt, synthetic construct; identical to SEQ ID NO: 19461
  modified_base 1..243: mod_base = OTHER; note = Each t is m1f
  source 1..243: mol_type = other RNA

SEQ ID NO: 21059 - RNA, 243 nt, synthetic construct; identical to SEQ ID NO: 19462
  modified_base 1..243: mod_base = OTHER; note = Each t is m1f
  source 1..243: mol_type = other RNA

SEQ ID NO: 21060 - RNA, 243 nt, synthetic construct; identical to SEQ ID NO: 19463
  modified_base 1..243: mod_base = OTHER; note = Each t is m1f
  source 1..243: mol_type = other RNA

SEQ ID NO: 21061 - RNA, 243 nt, synthetic construct; identical to SEQ ID NO: 19464
  modified_base 1..243: mod_base = OTHER; note = Each t is m1f
  source 1..243: mol_type = other RNA

SEQ ID NO: 21062 - RNA, 243 nt, synthetic construct; identical to SEQ ID NO: 19465
  modified_base 1..243: mod_base = OTHER; note = Each t is m1f
  source 1..243: mol_type = other RNA

SEQ ID NO: 21063 - RNA, 243 nt, synthetic construct; identical to SEQ ID NO: 19466
  modified_base 1..243: mod_base = OTHER; note = Each t is m1f
  source 1..243: mol_type = other RNA

SEQ ID NO: 21064 - RNA, 243 nt, synthetic construct; identical to SEQ ID NO: 19467
  modified_base 1..243: mod_base = OTHER; note = Each t is m1f
  source 1..243: mol_type = other RNA

SEQ ID NO: 21065 - RNA, 243 nt, synthetic construct; identical to SEQ ID NO: 19468
  modified_base 1..243: mod_base = OTHER; note = Each t is m1f
  source 1..243: mol_type = other RNA

SEQ ID NO: 21066 - RNA, 243 nt, synthetic construct; identical to SEQ ID NO: 19469
  modified_base 1..243: mod_base = OTHER; note = Each t is m1f
  source 1..243: mol_type = other RNA

SEQ ID NO: 21067 - RNA, 243 nt, synthetic construct; identical to SEQ ID NO: 19470
  modified_base 1..243: mod_base = OTHER; note = Each t is m1f
  source 1..243: mol_type = other RNA

SEQ ID NO: 21068 - RNA, 243 nt, synthetic construct; identical to SEQ ID NO: 19471
  modified_base 1..243: mod_base = OTHER; note = Each t is m1f
  source 1..243: mol_type = other RNA

SEQ ID NO: 21069 - RNA, 243 nt, synthetic construct; identical to SEQ ID NO: 19472
  modified_base 1..243: mod_base = OTHER; note = Each t is m1f
  source 1..243: mol_type = other RNA

SEQ ID NO: 21070 - RNA, 243 nt, synthetic construct; identical to SEQ ID NO: 19473
  modified_base 1..243: mod_base = OTHER; note = Each t is m1f
  source 1..243: mol_type = other RNA

SEQ ID NO: 21071 - RNA, 243 nt, synthetic construct; identical to SEQ ID NO: 19474
  modified_base 1..243: mod_base = OTHER; note = Each t is m1f
  source 1..243: mol_type = other RNA

SEQ ID NO: 21072 - RNA, 243 nt, synthetic construct; identical to SEQ ID NO: 19475
  modified_base 1..243: mod_base = OTHER; note = Each t is m1f
  source 1..243: mol_type = other RNA

SEQ ID NO: 21073 - RNA, 243 nt, synthetic construct; identical to SEQ ID NO: 19476
  modified_base 1..243: mod_base = OTHER; note = Each t is m1f
  source 1..243: mol_type = other RNA

SEQ ID NO: 21074 - RNA, 243 nt, synthetic construct; identical to SEQ ID NO: 19477
  modified_base 1..243: mod_base = OTHER; note = Each t is m1f
  source 1..243: mol_type = other RNA

SEQ ID NO: 21075 - RNA, 243 nt, synthetic construct; identical to SEQ ID NO: 19478
  modified_base 1..243: mod_base = OTHER; note = Each t is m1f
  source 1..243: mol_type = other RNA

SEQ ID NO: 21076 - RNA, 243 nt, synthetic construct; identical to SEQ ID NO: 19479
  modified_base 1..243: mod_base = OTHER; note = Each t is m1f
  source 1..243: mol_type = other RNA

SEQ ID NO: 21077 - RNA, 243 nt, synthetic construct; identical to SEQ ID NO: 19480
  modified_base 1..243: mod_base = OTHER; note = Each t is m1f
  source 1..243: mol_type = other RNA

SEQ ID NO: 21078 - RNA, 243 nt, synthetic construct; identical to SEQ ID NO: 19481
  modified_base 1..243: mod_base = OTHER; note = Each t is m1f
  source 1..243: mol_type = other RNA

SEQ ID NO: 21079 - RNA, 243 nt, synthetic construct; identical to SEQ ID NO: 19482
  modified_base 1..243: mod_base = OTHER; note = Each t is m1f
  source 1..243: mol_type = other RNA

SEQ ID NO: 21080 - RNA, 243 nt, synthetic construct; identical to SEQ ID NO: 19483
  modified_base 1..243: mod_base = OTHER; note = Each t is m1f
  source 1..243: mol_type = other RNA

SEQ ID NO: 21081 - RNA, 243 nt, synthetic construct; identical to SEQ ID NO: 19484
  modified_base 1..243: mod_base = OTHER; note = Each t is m1f
  source 1..243: mol_type = other RNA

SEQ ID NO: 21082 - RNA, 243 nt, synthetic construct; identical to SEQ ID NO: 19485
  modified_base 1..243: mod_base = OTHER; note = Each t is m1f
  source 1..243: mol_type = other RNA

SEQ ID NO: 21083 - RNA, 243 nt, synthetic construct; identical to SEQ ID NO: 19486
  modified_base 1..243: mod_base = OTHER; note = Each t is m1f
  source 1..243: mol_type = other RNA

SEQ ID NO: 21084 - RNA, 243 nt, synthetic construct; identical to SEQ ID NO: 19487
  modified_base 1..243: mod_base = OTHER; note = Each t is m1f
  source 1..243: mol_type = other RNA

SEQ ID NO: 21085 - RNA, 243 nt, synthetic construct; identical to SEQ ID NO: 19488
  modified_base 1..243: mod_base = OTHER; note = Each t is m1f
  source 1..243: mol_type = other RNA

SEQ ID NO: 21086 - RNA, 243 nt, synthetic construct; identical to SEQ ID NO: 19489
  modified_base 1..243: mod_base = OTHER; note = Each t is m1f
  source 1..243: mol_type = other RNA

SEQ ID NO: 21087 - RNA, 243 nt, synthetic construct; identical to SEQ ID NO: 19490
  modified_base 1..243: mod_base = OTHER; note = Each t is m1f
  source 1..243: mol_type = other RNA

SEQ ID NO: 21088 - RNA, 243 nt, synthetic construct; identical to SEQ ID NO: 19491
  modified_base 1..243: mod_base = OTHER; note = Each t is m1f
  source 1..243: mol_type = other RNA

SEQ ID NO: 21089 - RNA, 243 nt, synthetic construct; identical to SEQ ID NO: 19492
  modified_base 1..243: mod_base = OTHER; note = Each t is m1f
  source 1..243: mol_type = other RNA

SEQ ID NO: 21090 - RNA, 243 nt, synthetic construct; identical to SEQ ID NO: 19493
  modified_base 1..243: mod_base = OTHER; note = Each t is m1f
  source 1..243: mol_type = other RNA

SEQ ID NO: 21091 - RNA, 243 nt, synthetic construct; identical to SEQ ID NO: 19494
  modified_base 1..243: mod_base = OTHER; note = Each t is m1f
  source 1..243: mol_type = other RNA

SEQ ID NO: 21092 - RNA, 243 nt, synthetic construct; identical to SEQ ID NO: 19495
  modified_base 1..243: mod_base = OTHER; note = Each t is m1f
  source 1..243: mol_type = other RNA

SEQ ID NO: 21093 - RNA, 243 nt, synthetic construct; identical to SEQ ID NO: 19496
  modified_base 1..243: mod_base = OTHER; note = Each t is m1f
  source 1..243: mol_type = other RNA

SEQ ID NO: 21094 - RNA, 243 nt, synthetic construct; identical to SEQ ID NO: 19497
  modified_base 1..243: mod_base = OTHER; note = Each t is m1f
  source 1..243: mol_type = other RNA

SEQ ID NO: 21095 - RNA, 243 nt, synthetic construct; identical to SEQ ID NO: 19498
  modified_base 1..243: mod_base = OTHER; note = Each t is m1f
  source 1..243: mol_type = other RNA

SEQ ID NO: 21096 - RNA, 243 nt, synthetic construct; identical to SEQ ID NO: 19499
  modified_base 1..243: mod_base = OTHER; note = Each t is m1f
  source 1..243: mol_type = other RNA

SEQ ID NO: 21097 - RNA, 243 nt, synthetic construct; identical to SEQ ID NO: 19500
  modified_base 1..243: mod_base = OTHER; note = Each t is m1f
  source 1..243: mol_type = other RNA

SEQ ID NO: 21098 - RNA, 243 nt, synthetic construct; identical to SEQ ID NO: 19501
  modified_base 1..243: mod_base = OTHER; note = Each t is m1f
  source 1..243: mol_type = other RNA

SEQ ID NO: 21099 - RNA, 243 nt, synthetic construct; identical to SEQ ID NO: 19502
  modified_base 1..243: mod_base = OTHER; note = Each t is m1f
  source 1..243: mol_type = other RNA

SEQ ID NO: 21100 - RNA, 243 nt, synthetic construct; identical to SEQ ID NO: 19503
  modified_base 1..243: mod_base = OTHER; note = Each t is m1f
  source 1..243: mol_type = other RNA

SEQ ID NO: 21101 - RNA, 243 nt, synthetic construct; identical to SEQ ID NO: 19504
  modified_base 1..243: mod_base = OTHER; note = Each t is m1f
  source 1..243: mol_type = other RNA

SEQ ID NO: 21102 - RNA, 243 nt, synthetic construct; identical to SEQ ID NO: 19505
  modified_base 1..243: mod_base = OTHER; note = Each t is m1f
  source 1..243: mol_type = other RNA

SEQ ID NO: 21103 - RNA, 243 nt, synthetic construct; identical to SEQ ID NO: 19506
  modified_base 1..243: mod_base = OTHER; note = Each t is m1f
  source 1..243: mol_type = other RNA

SEQ ID NO: 21104 - RNA, 243 nt, synthetic construct; identical to SEQ ID NO: 19507
  modified_base 1..243: mod_base = OTHER; note = Each t is m1f
  source 1..243: mol_type = other RNA

SEQ ID NO: 21105 - RNA, 243 nt, synthetic construct; identical to SEQ ID NO: 19508
  modified_base 1..243: mod_base = OTHER; note = Each t is m1f
  source 1..243: mol_type = other RNA

SEQ ID NO: 21106 - RNA, 243 nt, synthetic construct; identical to SEQ ID NO: 19509
  modified_base 1..243: mod_base = OTHER; note = Each t is m1f
  source 1..243: mol_type = other RNA

SEQ ID NO: 21107 - RNA, 243 nt, synthetic construct; identical to SEQ ID NO: 19510
  modified_base 1..243: mod_base = OTHER; note = Each t is m1f
  source 1..243: mol_type = other RNA

SEQ ID NO: 21108 - RNA, 243 nt, synthetic construct; identical to SEQ ID NO: 19511
  modified_base 1..243: mod_base = OTHER; note = Each t is m1f
  source 1..243: mol_type = other RNA

SEQ ID NO: 21109 - RNA, 243 nt, synthetic construct; identical to SEQ ID NO: 19512
  modified_base 1..243: mod_base = OTHER; note = Each t is m1f
  source 1..243: mol_type = other RNA

SEQ ID NO: 21110 - RNA, 243 nt, synthetic construct; identical to SEQ ID NO: 19513
  modified_base 1..243: mod_base = OTHER; note = Each t is m1f
  source 1..243: mol_type = other RNA

SEQ ID NO: 21111 - RNA, 243 nt, synthetic construct; identical to SEQ ID NO: 19514
  modified_base 1..243: mod_base = OTHER; note = Each t is m1f
  source 1..243: mol_type = other RNA

SEQ ID NO: 21112 - RNA, 243 nt, synthetic construct; identical to SEQ ID NO: 19515
  modified_base 1..243: mod_base = OTHER; note = Each t is m1f
  source 1..243: mol_type = other RNA

SEQ ID NO: 21113 - RNA, 243 nt, synthetic construct; identical to SEQ ID NO: 19516
  modified_base 1..243: mod_base = OTHER; note = Each t is m1f
  source 1..243: mol_type = other RNA

SEQ ID NO: 21114 - RNA, 243 nt, synthetic construct; identical to SEQ ID NO: 19517
  modified_base 1..243: mod_base = OTHER; note = Each t is m1f
  source 1..243: mol_type = other RNA

SEQ ID NO: 21115 - RNA, 243 nt, synthetic construct; identical to SEQ ID NO: 19518
  modified_base 1..243: mod_base = OTHER; note = Each t is m1f
  source 1..243: mol_type = other RNA

SEQ ID NO: 21116 - RNA, 243 nt, synthetic construct; identical to SEQ ID NO: 19519
  modified_base 1..243: mod_base = OTHER; note = Each t is m1f
  source 1..243: mol_type = other RNA

SEQ ID NO: 21117 - RNA, 243 nt, synthetic construct; identical to SEQ ID NO: 19520
  modified_base 1..243: mod_base = OTHER; note = Each t is m1f
  source 1..243: mol_type = other RNA

SEQ ID NO: 21118 - RNA, 243 nt, synthetic construct; identical to SEQ ID NO: 19521
  modified_base 1..243: mod_base = OTHER; note = Each t is m1f
  source 1..243: mol_type = other RNA

SEQ ID NO: 21119 - RNA, 243 nt, synthetic construct; identical to SEQ ID NO: 19522
  modified_base 1..243: mod_base = OTHER; note = Each t is m1f
  source 1..243: mol_type = other RNA

SEQ ID NO: 21120 - RNA, 243 nt, synthetic construct; identical to SEQ ID NO: 19523
  modified_base 1..243: mod_base = OTHER; note = Each t is m1f
  source 1..243: mol_type = other RNA

SEQ ID NO: 21121 - RNA, 243 nt, synthetic construct; identical to SEQ ID NO: 19524
  modified_base 1..243: mod_base = OTHER; note = Each t is m1f
  source 1..243: mol_type = other RNA

SEQ ID NO: 21122 - RNA, 243 nt, synthetic construct; identical to SEQ ID NO: 19525
  modified_base 1..243: mod_base = OTHER; note = Each t is m1f
  source 1..243: mol_type = other RNA

SEQ ID NO: 21123 - RNA, 243 nt, synthetic construct; identical to SEQ ID NO: 19526
  modified_base 1..243: mod_base = OTHER; note = Each t is m1f
  source 1..243: mol_type = other RNA

SEQ ID NO: 21124 - RNA, 243 nt, synthetic construct; identical to SEQ ID NO: 19527
  modified_base 1..243: mod_base = OTHER; note = Each t is m1f
  source 1..243: mol_type = other RNA

SEQ ID NO: 21125 - RNA, 243 nt, synthetic construct; identical to SEQ ID NO: 19528
  modified_base 1..243: mod_base = OTHER; note = Each t is m1f
  source 1..243: mol_type = other RNA

SEQ ID NO: 21126 - RNA, 243 nt, synthetic construct; identical to SEQ ID NO: 19529
  modified_base 1..243: mod_base = OTHER; note = Each t is m1f
  source 1..243: mol_type = other RNA

SEQ ID NO: 21127 - RNA, 243 nt, synthetic construct; identical to SEQ ID NO: 19530
  modified_base 1..243: mod_base = OTHER; note = Each t is m1f
  source 1..243: mol_type = other RNA

SEQ ID NO: 21128 - RNA, 243 nt, synthetic construct; identical to SEQ ID NO: 19531
  modified_base 1..243: mod_base = OTHER; note = Each t is m1f
  source 1..243: mol_type = other RNA

SEQ ID NO: 21129 - RNA, 243 nt, synthetic construct; identical to SEQ ID NO: 19532
  modified_base 1..243: mod_base = OTHER; note = Each t is m1f
  source 1..243: mol_type = other RNA

SEQ ID NO: 21130 - RNA, 243 nt, synthetic construct; identical to SEQ ID NO: 19533
  modified_base 1..243: mod_base = OTHER; note = Each t is m1f
  source 1..243: mol_type = other RNA

SEQ ID NO: 21131 - RNA, 243 nt, synthetic construct; identical to SEQ ID NO: 19534
  modified_base 1..243: mod_base = OTHER; note = Each t is m1f
  source 1..243: mol_type = other RNA

SEQ ID NO: 21132 - RNA, 243 nt, synthetic construct; identical to SEQ ID NO: 19535
  modified_base 1..243: mod_base = OTHER; note = Each t is m1f
  source 1..243: mol_type = other RNA

SEQ ID NO: 21133 - RNA, 243 nt, synthetic construct; identical to SEQ ID NO: 19536
  modified_base 1..243: mod_base = OTHER; note = Each t is m1f
  source 1..243: mol_type = other RNA

SEQ ID NO: 21134 - RNA, 243 nt, synthetic construct; identical to SEQ ID NO: 19537
  modified_base 1..243: mod_base = OTHER; note = Each t is m1f
  source 1..243: mol_type = other RNA

SEQ ID NO: 21135 - RNA, 243 nt, synthetic construct; identical to SEQ ID NO: 19538
  modified_base 1..243: mod_base = OTHER; note = Each t is m1f
  source 1..243: mol_type = other RNA

SEQ ID NO: 21136 - RNA, 243 nt, synthetic construct; identical to SEQ ID NO: 19539
  modified_base 1..243: mod_base = OTHER; note = Each t is m1f
  source 1..243: mol_type = other RNA

SEQ ID NO: 21137 - RNA, 243 nt, synthetic construct; identical to SEQ ID NO: 19540
  modified_base 1..243: mod_base = OTHER; note = Each t is m1f
  source 1..243: mol_type = other RNA

SEQ ID NO: 21138 - RNA, 243 nt, synthetic construct; identical to SEQ ID NO: 19541
  modified_base 1..243: mod_base = OTHER; note = Each t is m1f
  source 1..243: mol_type = other RNA

SEQ ID NO: 21139 - RNA, 243 nt, synthetic construct; identical to SEQ ID NO: 19542
  modified_base 1..243: mod_base = OTHER; note = Each t is m1f
  source 1..243: mol_type = other RNA

SEQ ID NO: 21140 - RNA, 243 nt, synthetic construct; identical to SEQ ID NO: 19543
  modified_base 1..243: mod_base = OTHER; note = Each t is m1f
  source 1..243: mol_type = other RNA

SEQ ID NO: 21141 - RNA, 243 nt, synthetic construct; identical to SEQ ID NO: 19544
  modified_base 1..243: mod_base = OTHER; note = Each t is m1f
  source 1..243: mol_type = other RNA

SEQ ID NO: 21142 - RNA, 243 nt, synthetic construct; identical to SEQ ID NO: 19545
  modified_base 1..243: mod_base = OTHER; note = Each t is m1f
  source 1..243: mol_type = other RNA

SEQ ID NO: 21143 - RNA, 243 nt, synthetic construct; identical to SEQ ID NO: 19546
  modified_base 1..243: mod_base = OTHER; note = Each t is m1f
  source 1..243: mol_type = other RNA

SEQ ID NO: 21144 - RNA, 243 nt, synthetic construct; identical to SEQ ID NO: 19547
  modified_base 1..243: mod_base = OTHER; note = Each t is m1f
  source 1..243: mol_type = other RNA

SEQ ID NO: 21145 - RNA, 243 nt, synthetic construct; identical to SEQ ID NO: 19548
  modified_base 1..243: mod_base = OTHER; note = Each t is m1f
  source 1..243: mol_type = other RNA

SEQ ID NO: 21146 - RNA, 243 nt, synthetic construct; identical to SEQ ID NO: 19549
  modified_base 1..243: mod_base = OTHER; note = Each t is m1f
  source 1..243: mol_type = other RNA

SEQ ID NO: 21147 - RNA, 243 nt, synthetic construct; identical to SEQ ID NO: 19550
  modified_base 1..243: mod_base = OTHER; note = Each t is m1f
  source 1..243: mol_type = other RNA

SEQ ID NO: 21148 - RNA, 243 nt, synthetic construct; identical to SEQ ID NO: 19551
  modified_base 1..243: mod_base = OTHER; note = Each t is m1f
  source 1..243: mol_type = other RNA

SEQ ID NO: 21149 - RNA, 243 nt, synthetic construct; identical to SEQ ID NO: 19552
  modified_base 1..243: mod_base = OTHER; note = Each t is m1f
  source 1..243: mol_type = other RNA

SEQ ID NO: 21150 - RNA, 243 nt, synthetic construct; identical to SEQ ID NO: 19553
  modified_base 1..243: mod_base = OTHER; note = Each t is m1f
  source 1..243: mol_type = other RNA

SEQ ID NO: 21151 - RNA, 243 nt, synthetic construct; identical to SEQ ID NO: 19554
  modified_base 1..243: mod_base = OTHER; note = Each t is m1f
  source 1..243: mol_type = other RNA

SEQ ID NO: 21152 - RNA, 243 nt, synthetic construct; identical to SEQ ID NO: 19555
  modified_base 1..243: mod_base = OTHER; note = Each t is m1f
  source 1..243: mol_type = other RNA

SEQ ID NO: 21153 - RNA, 243 nt, synthetic construct; identical to SEQ ID NO: 19556
  modified_base 1..243: mod_base = OTHER; note = Each t is m1f
  source 1..243: mol_type = other RNA

SEQ ID NO: 21154 - RNA, 243 nt, synthetic construct; identical to SEQ ID NO: 19557
  modified_base 1..243: mod_base = OTHER; note = Each t is m1f
  source 1..243: mol_type = other RNA

SEQ ID NO: 21155 - RNA, 243 nt, synthetic construct; identical to SEQ ID NO: 19558
  modified_base 1..243: mod_base = OTHER; note = Each t is m1f
  source 1..243: mol_type = other RNA

SEQ ID NO: 21156 - RNA, 243 nt, synthetic construct; identical to SEQ ID NO: 19559
  modified_base 1..243: mod_base = OTHER; note = Each t is m1f
  source 1..243: mol_type = other RNA

SEQ ID NO: 21157 - RNA, 243 nt, synthetic construct; identical to SEQ ID NO: 19560
  modified_base 1..243: mod_base = OTHER; note = Each t is m1f
  source 1..243: mol_type = other RNA

SEQ ID NO: 21158 - RNA, 243 nt, synthetic construct; identical to SEQ ID NO: 19561
  modified_base 1..243: mod_base = OTHER; note = Each t is m1f
  source 1..243: mol_type = other RNA

SEQ ID NO: 21159 - RNA, 243 nt, synthetic construct; identical to SEQ ID NO: 19562
  modified_base 1..243: mod_base = OTHER; note = Each t is m1f
  source 1..243: mol_type = other RNA

SEQ ID NO: 21160 - RNA, 240 nt, synthetic construct; identical to SEQ ID NO: 19563
  modified_base 1..240: mod_base = OTHER; note = Each t is m1f
  source 1..240: mol_type = other RNA

SEQ ID NO: 21161 - RNA, 243 nt, synthetic construct; identical to SEQ ID NO: 19564
  modified_base 1..243: mod_base = OTHER; note = Each t is m1f
  source 1..243: mol_type = other RNA

SEQ ID NO: 21162 - RNA, 243 nt, synthetic construct; identical to SEQ ID NO: 19565
  modified_base 1..243: mod_base = OTHER; note = Each t is m1f
  source 1..243: mol_type = other RNA

SEQ ID NO: 21163 - RNA, 243 nt, synthetic construct; identical to SEQ ID NO: 19566
  modified_base 1..243: mod_base = OTHER; note = Each t is m1f
  source 1..243: mol_type = other RNA

SEQ ID NO: 21164 - RNA, 243 nt, synthetic construct; identical to SEQ ID NO: 19567
  modified_base 1..243: mod_base = OTHER; note = Each t is m1f
  source 1..243: mol_type = other RNA

SEQ ID NO: 21165 - RNA, 243 nt, synthetic construct; identical to SEQ ID NO: 19568
  modified_base 1..243: mod_base = OTHER; note = Each t is m1f
  source 1..243: mol_type = other RNA

SEQ ID NO: 21166 - RNA, 243 nt, synthetic construct; identical to SEQ ID NO: 19569
  modified_base 1..243: mod_base = OTHER; note = Each t is m1f
  source 1..243: mol_type = other RNA

SEQ ID NO: 21167 - RNA, 243 nt, synthetic construct; identical to SEQ ID NO: 19570
  modified_base 1..243: mod_base = OTHER; note = Each t is m1f
  source 1..243: mol_type = other RNA

SEQ ID NO: 21168 - RNA, 243 nt, synthetic construct; identical to SEQ ID NO: 19571
  modified_base 1..243: mod_base = OTHER; note = Each t is m1f
  source 1..243: mol_type = other RNA

SEQ ID NO: 21169 - RNA, 243 nt, synthetic construct; identical to SEQ ID NO: 19572
  modified_base 1..243: mod_base = OTHER; note = Each t is m1f
  source 1..243: mol_type = other RNA

SEQ ID NO: 21170 - RNA, 243 nt, synthetic construct; identical to SEQ ID NO: 19573
  modified_base 1..243: mod_base = OTHER; note = Each t is m1f
  source 1..243: mol_type = other RNA

SEQ ID NO: 21171 - RNA, 243 nt, synthetic construct; identical to SEQ ID NO: 19574
  modified_base 1..243: mod_base = OTHER; note = Each t is m1f
  source 1..243: mol_type = other RNA

SEQ ID NO: 21172 - RNA, 243 nt, synthetic construct; identical to SEQ ID NO: 19575
  modified_base 1..243: mod_base = OTHER; note = Each t is m1f
  source 1..243: mol_type = other RNA

SEQ ID NO: 21173 - RNA, 243 nt, synthetic construct; identical to SEQ ID NO: 19576
  modified_base 1..243: mod_base = OTHER; note = Each t is m1f
  source 1..243: mol_type = other RNA

SEQ ID NO: 21174 - RNA, 243 nt, synthetic construct; identical to SEQ ID NO: 19577
  modified_base 1..243: mod_base = OTHER; note = Each t is m1f
  source 1..243: mol_type = other RNA

SEQ ID NO: 21175 - RNA, 243 nt, synthetic construct; identical to SEQ ID NO: 19578
  modified_base 1..243: mod_base = OTHER; note = Each t is m1f
  source 1..243: mol_type = other RNA

SEQ ID NO: 21176 - RNA, 243 nt, synthetic construct; identical to SEQ ID NO: 19579
  modified_base 1..243: mod_base = OTHER; note = Each t is m1f
  source 1..243: mol_type = other RNA

SEQ ID NO: 21177 - RNA, 243 nt, synthetic construct; identical to SEQ ID NO: 19580
  modified_base 1..243: mod_base = OTHER; note = Each t is m1f
  source 1..243: mol_type = other RNA

SEQ ID NO: 21178 - RNA, 243 nt, synthetic construct; identical to SEQ ID NO: 19581
  modified_base 1..243: mod_base = OTHER; note = Each t is m1f
  source 1..243: mol_type = other RNA

SEQ ID NO: 21179 - RNA, 243 nt, synthetic construct; identical to SEQ ID NO: 19582
  modified_base 1..243: mod_base = OTHER; note = Each t is m1f
  source 1..243: mol_type = other RNA

SEQ ID NO: 21180 - RNA, 243 nt, synthetic construct; identical to SEQ ID NO: 19583
  modified_base 1..243: mod_base = OTHER; note = Each t is m1f
  source 1..243: mol_type = other RNA

SEQ ID NO: 21181 - RNA, 243 nt, synthetic construct; identical to SEQ ID NO: 19584
  modified_base 1..243: mod_base = OTHER; note = Each t is m1f
  source 1..243: mol_type = other RNA

SEQ ID NO: 21182 - RNA, 243 nt, synthetic construct; identical to SEQ ID NO: 19585
  modified_base 1..243: mod_base = OTHER; note = Each t is m1f
  source 1..243: mol_type = other RNA

SEQ ID NO: 21183 - RNA, 243 nt, synthetic construct; identical to SEQ ID NO: 19586
  modified_base 1..243: mod_base = OTHER; note = Each t is m1f
  source 1..243: mol_type = other RNA

SEQ ID NO: 21184 - RNA, 243 nt, synthetic construct; identical to SEQ ID NO: 19587
  modified_base 1..243: mod_base = OTHER; note = Each t is m1f
  source 1..243: mol_type = other RNA

SEQ ID NO: 21185 - RNA, 243 nt, synthetic construct; identical to SEQ ID NO: 19588
  modified_base 1..243: mod_base = OTHER; note = Each t is m1f
  source 1..243: mol_type = other RNA

SEQ ID NO: 21186 - RNA, 243 nt, synthetic construct; identical to SEQ ID NO: 19589
  modified_base 1..243: mod_base = OTHER; note = Each t is m1f
  source 1..243: mol_type = other RNA

SEQ ID NO: 21187 - RNA, 243 nt, synthetic construct; identical to SEQ ID NO: 19590
  modified_base 1..243: mod_base = OTHER; note = Each t is m1f
  source 1..243: mol_type = other RNA

SEQ ID NO: 21188 - RNA, 243 nt, synthetic construct; identical to SEQ ID NO: 19591
  modified_base 1..243: mod_base = OTHER; note = Each t is m1f
  source 1..243: mol_type = other RNA

SEQ ID NO: 21189 - RNA, 243 nt, synthetic construct; identical to SEQ ID NO: 19592
  modified_base 1..243: mod_base = OTHER; note = Each t is m1f
  source 1..243: mol_type = other RNA

SEQ ID NO: 21190 - RNA, 243 nt, synthetic construct; identical to SEQ ID NO: 19593
  modified_base 1..243: mod_base = OTHER; note = Each t is m1f
  source 1..243: mol_type = other RNA

SEQ ID NO: 21191 - RNA, 243 nt, synthetic construct; identical to SEQ ID NO: 19594
  modified_base 1..243: mod_base = OTHER; note = Each t is m1f
  source 1..243: mol_type = other RNA

SEQ ID NO: 21192 - RNA, 243 nt, synthetic construct; identical to SEQ ID NO: 19595
  modified_base 1..243: mod_base = OTHER; note = Each t is m1f
  source 1..243: mol_type = other RNA

SEQ ID NO: 21193 - RNA, 243 nt, synthetic construct; identical to SEQ ID NO: 19596
  modified_base 1..243: mod_base = OTHER; note = Each t is m1f
  source 1..243: mol_type = other RNA

SEQ ID NO: 21194 - RNA, 243 nt, synthetic construct; identical to SEQ ID NO: 19597
  modified_base 1..243: mod_base = OTHER; note = Each t is m1f
  source 1..243: mol_type = other RNA

SEQ ID NO: 21195 - RNA, 243 nt, synthetic construct; identical to SEQ ID NO: 19598
  modified_base 1..243: mod_base = OTHER; note = Each t is m1f
  source 1..243: mol_type = other RNA

SEQ ID NO: 21196 - RNA, 243 nt, synthetic construct; identical to SEQ ID NO: 19599
  modified_base 1..243: mod_base = OTHER; note = Each t is m1f
  source 1..243: mol_type = other RNA

SEQ ID NO: 21197 - RNA, 243 nt, synthetic construct; identical to SEQ ID NO: 19600
  modified_base 1..243: mod_base = OTHER; note = Each t is m1f
  source 1..243: mol_type = other RNA

SEQ ID NO: 21198 - RNA, 243 nt, synthetic construct; identical to SEQ ID NO: 19601
  modified_base 1..243: mod_base = OTHER; note = Each t is m1f
  source 1..243: mol_type = other RNA

SEQ ID NO: 21199 - RNA, 243 nt, synthetic construct; identical to SEQ ID NO: 19602
  modified_base 1..243: mod_base = OTHER; note = Each t is m1f
  source 1..243: mol_type = other RNA

SEQ ID NO: 21200 - RNA, 243 nt, synthetic construct; identical to SEQ ID NO: 19603
  modified_base 1..243: mod_base = OTHER; note = Each t is m1f
  source 1..243: mol_type = other RNA

SEQ ID NO: 21201 - RNA, 243 nt, synthetic construct; identical to SEQ ID NO: 19604
  modified_base 1..243: mod_base = OTHER; note = Each t is m1f
  source 1..243: mol_type = other RNA

SEQ ID NO: 21202 - RNA, 243 nt, synthetic construct; identical to SEQ ID NO: 19605
  modified_base 1..243: mod_base = OTHER; note = Each t is m1f
  source 1..243: mol_type = other RNA

SEQ ID NO: 21203 - RNA, 243 nt, synthetic construct; identical to SEQ ID NO: 19606
  modified_base 1..243: mod_base = OTHER; note = Each t is m1f
  source 1..243: mol_type = other RNA

SEQ ID NO: 21204 - RNA, 243 nt, synthetic construct; identical to SEQ ID NO: 19607
  modified_base 1..243: mod_base = OTHER; note = Each t is m1f
  source 1..243: mol_type = other RNA

SEQ ID NO: 21205 - RNA, 243 nt, synthetic construct; identical to SEQ ID NO: 19608
  modified_base 1..243: mod_base = OTHER; note = Each t is m1f
  source 1..243: mol_type = other RNA

SEQ ID NO: 21206 - RNA, 243 nt, synthetic construct; identical to SEQ ID NO: 19609
  modified_base 1..243: mod_base = OTHER; note = Each t is m1f
  source 1..243: mol_type = other RNA

SEQ ID NO: 21207 - RNA, 243 nt, synthetic construct; identical to SEQ ID NO: 19610
  modified_base 1..243: mod_base = OTHER; note = Each t is m1f
  source 1..243: mol_type = other RNA

SEQ ID NO: 21208 - RNA, 243 nt, synthetic construct; identical to SEQ ID NO: 19611
  modified_base 1..243: mod_base = OTHER; note = Each t is m1f
  source 1..243: mol_type = other RNA

SEQ ID NO: 21209 - RNA, 243 nt, synthetic construct; identical to SEQ ID NO: 19612
  modified_base 1..243: mod_base = OTHER; note = Each t is m1f
  source 1..243: mol_type = other RNA

SEQ ID NO: 21210 - RNA, 243 nt, synthetic construct; identical to SEQ ID NO: 19613
  modified_base 1..243: mod_base = OTHER; note = Each t is m1f
  source 1..243: mol_type = other RNA

SEQ ID NO: 21211 - RNA, 243 nt, synthetic construct; identical to SEQ ID NO: 19614
  modified_base 1..243: mod_base = OTHER; note = Each t is m1f
  source 1..243: mol_type = other RNA

SEQ ID NO: 21212 - RNA, 243 nt, synthetic construct; identical to SEQ ID NO: 19615
  modified_base 1..243: mod_base = OTHER; note = Each t is m1f
  source 1..243: mol_type = other RNA

SEQ ID NO: 21213 - RNA, 243 nt, synthetic construct; identical to SEQ ID NO: 19616
  modified_base 1..243: mod_base = OTHER; note = Each t is m1f
  source 1..243: mol_type = other RNA

SEQ ID NO: 21214 - RNA, 243 nt, synthetic construct; identical to SEQ ID NO: 19617
  modified_base 1..243: mod_base = OTHER; note = Each t is m1f
  source 1..243: mol_type = other RNA

SEQ ID NO: 21215 - RNA, 243 nt, synthetic construct; identical to SEQ ID NO: 19618
  modified_base 1..243: mod_base = OTHER; note = Each t is m1f
  source 1..243: mol_type = other RNA

SEQ ID NO: 21216 - RNA, 243 nt, synthetic construct; identical to SEQ ID NO: 19619
  modified_base 1..243: mod_base = OTHER; note = Each t is m1f
  source 1..243: mol_type = other RNA

SEQ ID NO: 21217 - RNA, 243 nt, synthetic construct; identical to SEQ ID NO: 19620
  modified_base 1..243: mod_base = OTHER; note = Each t is m1f
  source 1..243: mol_type = other RNA

SEQ ID NO: 21218 - RNA, 243 nt, synthetic construct; identical to SEQ ID NO: 19621
  modified_base 1..243: mod_base = OTHER; note = Each t is m1f
  source 1..243: mol_type = other RNA

SEQ ID NO: 21219 - RNA, 243 nt, synthetic construct; identical to SEQ ID NO: 19622
  modified_base 1..243: mod_base = OTHER; note = Each t is m1f
  source 1..243: mol_type = other RNA

SEQ ID NO: 21220 - RNA, 243 nt, synthetic construct; identical to SEQ ID NO: 19623
  modified_base 1..243: mod_base = OTHER; note = Each t is m1f
  source 1..243: mol_type = other RNA

SEQ ID NO: 21221 - RNA, 243 nt, synthetic construct; identical to SEQ ID NO: 19624
  modified_base 1..243: mod_base = OTHER; note = Each t is m1f
  source 1..243: mol_type = other RNA

SEQ ID NO: 21222 - RNA, 243 nt, synthetic construct; identical to SEQ ID NO: 19625
  modified_base 1..243: mod_base = OTHER; note = Each t is m1f
  source 1..243: mol_type = other RNA

SEQ ID NO: 21223 - RNA, 243 nt, synthetic construct; identical to SEQ ID NO: 19626
  modified_base 1..243: mod_base = OTHER; note = Each t is m1f
  source 1..243: mol_type = other RNA

SEQ ID NO: 21224 - RNA, 243 nt, synthetic construct; identical to SEQ ID NO: 19627
  modified_base 1..243: mod_base = OTHER; note = Each t is m1f
  source 1..243: mol_type = other RNA

SEQ ID NO: 21225 - RNA, 243 nt, synthetic construct; identical to SEQ ID NO: 19628
  modified_base 1..243: mod_base = OTHER; note = Each t is m1f
  source 1..243: mol_type = other RNA

SEQ ID NO: 21226 - RNA, 243 nt, synthetic construct; identical to SEQ ID NO: 19629
  modified_base 1..243: mod_base = OTHER; note = Each t is m1f
  source 1..243: mol_type = other RNA

SEQ ID NO: 21227 - RNA, 243 nt, synthetic construct; identical to SEQ ID NO: 19630
  modified_base 1..243: mod_base = OTHER; note = Each t is m1f
  source 1..243: mol_type = other RNA

SEQ ID NO: 21228 - RNA, 243 nt, synthetic construct; identical to SEQ ID NO: 19631
  modified_base 1..243: mod_base = OTHER; note = Each t is m1f
  source 1..243: mol_type = other RNA

SEQ ID NO: 21229 - RNA, 243 nt, synthetic construct; identical to SEQ ID NO: 19632
  modified_base 1..243: mod_base = OTHER; note = Each t is m1f
  source 1..243: mol_type = other RNA

SEQ ID NO: 21230 - RNA, 243 nt, synthetic construct; identical to SEQ ID NO: 19633
  modified_base 1..243: mod_base = OTHER; note = Each t is m1f
  source 1..243: mol_type = other RNA

SEQ ID NO: 21231 - RNA, 243 nt, synthetic construct; identical to SEQ ID NO: 19634
  modified_base 1..243: mod_base = OTHER; note = Each t is m1f
  source 1..243: mol_type = other RNA

SEQ ID NO: 21232 - RNA, 243 nt, synthetic construct; identical to SEQ ID NO: 19635
  modified_base 1..243: mod_base = OTHER; note = Each t is m1f
  source 1..243: mol_type = other RNA

SEQ ID NO: 21233 - RNA, 243 nt, synthetic construct; identical to SEQ ID NO: 19636
  modified_base 1..243: mod_base = OTHER; note = Each t is m1f
  source 1..243: mol_type = other RNA

SEQ ID NO: 21234 - RNA, 243 nt, synthetic construct; identical to SEQ ID NO: 19637
  modified_base 1..243: mod_base = OTHER; note = Each t is m1f
  source 1..243: mol_type = other RNA

SEQ ID NO: 21235 - RNA, 243 nt, synthetic construct; identical to SEQ ID NO: 19638
  modified_base 1..243: mod_base = OTHER; note = Each t is m1f
  source 1..243: mol_type = other RNA

SEQ ID NO: 21236 - RNA, 243 nt, synthetic construct; identical to SEQ ID NO: 19639
  modified_base 1..243: mod_base = OTHER; note = Each t is m1f
  source 1..243: mol_type = other RNA

SEQ ID NO: 21237 - RNA, 243 nt, synthetic construct; identical to SEQ ID NO: 19640
  modified_base 1..243: mod_base = OTHER; note = Each t is m1f
  source 1..243: mol_type = other RNA

SEQ ID NO: 21238 - RNA, 243 nt, synthetic construct; identical to SEQ ID NO: 19641
  modified_base 1..243: mod_base = OTHER; note = Each t is m1f
  source 1..243: mol_type = other RNA

SEQ ID NO: 21239 - RNA, 243 nt, synthetic construct; identical to SEQ ID NO: 19642
  modified_base 1..243: mod_base = OTHER; note = Each t is m1f
  source 1..243: mol_type = other RNA

SEQ ID NO: 21240 - RNA, 243 nt, synthetic construct; identical to SEQ ID NO: 19643
  modified_base 1..243: mod_base = OTHER; note = Each t is m1f
  source 1..243: mol_type = other RNA

SEQ ID NO: 21241 - RNA, 243 nt, synthetic construct; identical to SEQ ID NO: 19644
  modified_base 1..243: mod_base = OTHER; note = Each t is m1f
  source 1..243: mol_type = other RNA

SEQ ID NO: 21242 - RNA, 243 nt, synthetic construct; identical to SEQ ID NO: 19645
  modified_base 1..243: mod_base = OTHER; note = Each t is m1f
  source 1..243: mol_type = other RNA

SEQ ID NO: 21243 - RNA, 243 nt, synthetic construct; identical to SEQ ID NO: 19646
  modified_base 1..243: mod_base = OTHER; note = Each t is m1f
  source 1..243: mol_type = other RNA

SEQ ID NO: 21244 - RNA, 243 nt, synthetic construct; identical to SEQ ID NO: 19647
  modified_base 1..243: mod_base = OTHER; note = Each t is m1f
  source 1..243: mol_type = other RNA

SEQ ID NO: 21245 - RNA, 243 nt, synthetic construct; identical to SEQ ID NO: 19648
  modified_base 1..243: mod_base = OTHER; note = Each t is m1f
  source 1..243: mol_type = other RNA

SEQ ID NO: 21246 - RNA, 243 nt, synthetic construct; identical to SEQ ID NO: 19649
  modified_base 1..243: mod_base = OTHER; note = Each t is m1f
  source 1..243: mol_type = other RNA

SEQ ID NO: 21247 - RNA, 243 nt, synthetic construct; identical to SEQ ID NO: 19650
  modified_base 1..243: mod_base = OTHER; note = Each t is m1f
  source 1..243: mol_type = other RNA

SEQ ID NO: 21248 - RNA, 243 nt, synthetic construct; identical to SEQ ID NO: 19651
  modified_base 1..243: mod_base = OTHER; note = Each t is m1f
  source 1..243: mol_type = other RNA

SEQ ID NO: 21249 - RNA, 243 nt, synthetic construct; identical to SEQ ID NO: 19652
  modified_base 1..243: mod_base = OTHER; note = Each t is m1f
  source 1..243: mol_type = other RNA

SEQ ID NO: 21250 - RNA, 243 nt, synthetic construct; identical to SEQ ID NO: 19653
  modified_base 1..243: mod_base = OTHER; note = Each t is m1f
  source 1..243: mol_type = other RNA

SEQ ID NO: 21251 - RNA, 243 nt, synthetic construct; identical to SEQ ID NO: 19654
  modified_base 1..243: mod_base = OTHER; note = Each t is m1f
  source 1..243: mol_type = other RNA

SEQ ID NO: 21252 - RNA, 243 nt, synthetic construct; identical to SEQ ID NO: 19655
  modified_base 1..243: mod_base = OTHER; note = Each t is m1f
  source 1..243: mol_type = other RNA

SEQ ID NO: 21253 - RNA, 243 nt, synthetic construct; identical to SEQ ID NO: 19656
  modified_base 1..243: mod_base = OTHER; note = Each t is m1f
  source 1..243: mol_type = other RNA

SEQ ID NO: 21254 - RNA, 243 nt, synthetic construct; identical to SEQ ID NO: 19657
  modified_base 1..243: mod_base = OTHER; note = Each t is m1f
  source 1..243: mol_type = other RNA

SEQ ID NO: 21255 - RNA, 243 nt, synthetic construct; identical to SEQ ID NO: 19658
  modified_base 1..243: mod_base = OTHER; note = Each t is m1f
  source 1..243: mol_type = other RNA

SEQ ID NO: 21256 - RNA, 243 nt, synthetic construct; identical to SEQ ID NO: 19659
  modified_base 1..243: mod_base = OTHER; note = Each t is m1f
  source 1..243: mol_type = other RNA

SEQ ID NO: 21257 - RNA, 243 nt, synthetic construct; identical to SEQ ID NO: 19660
  modified_base 1..243: mod_base = OTHER; note = Each t is m1f
  source 1..243: mol_type = other RNA

SEQ ID NO: 21258 - RNA, 243 nt, synthetic construct; identical to SEQ ID NO: 19661
  modified_base 1..243: mod_base = OTHER; note = Each t is m1f
  source 1..243: mol_type = other RNA

SEQ ID NO: 21259 - RNA, 243 nt, synthetic construct; identical to SEQ ID NO: 19662
  modified_base 1..243: mod_base = OTHER; note = Each t is m1f
  source 1..243: mol_type = other RNA

SEQ ID NO: 21260 - RNA, 243 nt, synthetic construct; identical to SEQ ID NO: 19663
  modified_base 1..243: mod_base = OTHER; note = Each t is m1f
  source 1..243: mol_type = other RNA

SEQ ID NO: 21261 - RNA, 243 nt, synthetic construct; identical to SEQ ID NO: 19664
  modified_base 1..243: mod_base = OTHER; note = Each t is m1f
  source 1..243: mol_type = other RNA

SEQ ID NO: 21262 - RNA, 243 nt, synthetic construct; identical to SEQ ID NO: 19665
  modified_base 1..243: mod_base = OTHER; note = Each t is m1f
  source 1..243: mol_type = other RNA

SEQ ID NO: 21263 - RNA, 243 nt, synthetic construct; identical to SEQ ID NO: 19666
  modified_base 1..243: mod_base = OTHER; note = Each t is m1f
  source 1..243: mol_type = other RNA

SEQ ID NO: 21264 - RNA, 243 nt, synthetic construct; identical to SEQ ID NO: 19667
  modified_base 1..243: mod_base = OTHER; note = Each t is m1f
  source 1..243: mol_type = other RNA

SEQ ID NO: 21265 - RNA, 243 nt, synthetic construct; identical to SEQ ID NO: 19668
  modified_base 1..243: mod_base = OTHER; note = Each t is m1f
  source 1..243: mol_type = other RNA

SEQ ID NO: 21266 - RNA, 243 nt, synthetic construct; identical to SEQ ID NO: 19669
  modified_base 1..243: mod_base = OTHER; note = Each t is m1f
  source 1..243: mol_type = other RNA

SEQ ID NO: 21267 - RNA, 243 nt, synthetic construct; identical to SEQ ID NO: 19670
  modified_base 1..243: mod_base = OTHER; note = Each t is m1f
  source 1..243: mol_type = other RNA

SEQ ID NO: 21268 - RNA, 243 nt, synthetic construct; identical to SEQ ID NO: 19671
  modified_base 1..243: mod_base = OTHER; note = Each t is m1f
  source 1..243: mol_type = other RNA

SEQ ID NO: 21269 - RNA, 243 nt, synthetic construct; identical to SEQ ID NO: 19672
  modified_base 1..243: mod_base = OTHER; note = Each t is m1f
  source 1..243: mol_type = other RNA

SEQ ID NO: 21270 - RNA, 243 nt, synthetic construct; identical to SEQ ID NO: 19673
  modified_base 1..243: mod_base = OTHER; note = Each t is m1f
  source 1..243: mol_type = other RNA

SEQ ID NO: 21271 - RNA, 243 nt, synthetic construct; identical to SEQ ID NO: 19674
  modified_base 1..243: mod_base = OTHER; note = Each t is m1f
  source 1..243: mol_type = other RNA

SEQ ID NO: 21272 - RNA, 243 nt, synthetic construct; identical to SEQ ID NO: 19675
  modified_base 1..243: mod_base = OTHER; note = Each t is m1f
  source 1..243: mol_type = other RNA

SEQ ID NO: 21273 - RNA, 243 nt, synthetic construct; identical to SEQ ID NO: 19676
  modified_base 1..243: mod_base = OTHER; note = Each t is m1f
  source 1..243: mol_type = other RNA

SEQ ID NO: 21274 - RNA, 243 nt, synthetic construct; identical to SEQ ID NO: 19677
  modified_base 1..243: mod_base = OTHER; note = Each t is m1f
  source 1..243: mol_type = other RNA

SEQ ID NO: 21275 - RNA, 243 nt, synthetic construct; identical to SEQ ID NO: 19678
  modified_base 1..243: mod_base = OTHER; note = Each t is m1f
  source 1..243: mol_type = other RNA

SEQ ID NO: 21276 - RNA, 243 nt, synthetic construct; identical to SEQ ID NO: 19679
  modified_base 1..243: mod_base = OTHER; note = Each t is m1f
  source 1..243: mol_type = other RNA

SEQ ID NO: 21277 - RNA, 243 nt, synthetic construct; identical to SEQ ID NO: 19680
  modified_base 1..243: mod_base = OTHER; note = Each t is m1f
  source 1..243: mol_type = other RNA

SEQ ID NO: 21278 - RNA, 243 nt, synthetic construct; identical to SEQ ID NO: 19681
  modified_base 1..243: mod_base = OTHER; note = Each t is m1f
  source 1..243: mol_type = other RNA

SEQ ID NO: 21279 - RNA, 243 nt, synthetic construct; identical to SEQ ID NO: 19682
  modified_base 1..243: mod_base = OTHER; note = Each t is m1f
  source 1..243: mol_type = other RNA

SEQ ID NO: 21280 - RNA, 243 nt, synthetic construct; identical to SEQ ID NO: 19683
  modified_base 1..243: mod_base = OTHER; note = Each t is m1f
  source 1..243: mol_type = other RNA

SEQ ID NO: 21281 - RNA, 243 nt, synthetic construct; identical to SEQ ID NO: 19684
  modified_base 1..243: mod_base = OTHER; note = Each t is m1f
  source 1..243: mol_type = other RNA

SEQ ID NO: 21282 - RNA, 243 nt, synthetic construct; identical to SEQ ID NO: 19685
  modified_base 1..243: mod_base = OTHER; note = Each t is m1f
  source 1..243: mol_type = other RNA

SEQ ID NO: 21283 - RNA, 243 nt, synthetic construct; identical to SEQ ID NO: 19686
  modified_base 1..243: mod_base = OTHER; note = Each t is m1f
  source 1..243: mol_type = other RNA

SEQ ID NO: 21284 - RNA, 243 nt, synthetic construct; identical to SEQ ID NO: 19687
  modified_base 1..243: mod_base = OTHER; note = Each t is m1f
  source 1..243: mol_type = other RNA

SEQ ID NO: 21285 - RNA, 243 nt, synthetic construct; identical to SEQ ID NO: 19688
  modified_base 1..243: mod_base = OTHER; note = Each t is m1f
  source 1..243: mol_type = other RNA

SEQ ID NO: 21286 - RNA, 243 nt, synthetic construct; identical to SEQ ID NO: 19689
  modified_base 1..243: mod_base = OTHER; note = Each t is m1f
  source 1..243: mol_type = other RNA

SEQ ID NO: 21287 - RNA, 243 nt, synthetic construct; identical to SEQ ID NO: 19690
  modified_base 1..243: mod_base = OTHER; note = Each t is m1f
  source 1..243: mol_type = other RNA

SEQ ID NO: 21288 - RNA, 243 nt, synthetic construct; identical to SEQ ID NO: 19691
  modified_base 1..243: mod_base = OTHER; note = Each t is m1f
  source 1..243: mol_type = other RNA

SEQ ID NO: 21289 - RNA, 243 nt, synthetic construct; identical to SEQ ID NO: 19692
  modified_base 1..243: mod_base = OTHER; note = Each t is m1f
  source 1..243: mol_type = other RNA

SEQ ID NO: 21290 - RNA, 243 nt, synthetic construct; identical to SEQ ID NO: 19693
  modified_base 1..243: mod_base = OTHER; note = Each t is m1f
  source 1..243: mol_type = other RNA

SEQ ID NO: 21291 - RNA, 243 nt, synthetic construct; identical to SEQ ID NO: 19694
  modified_base 1..243: mod_base = OTHER; note = Each t is m1f
  source 1..243: mol_type = other RNA

SEQ ID NO: 21292 - RNA, 243 nt, synthetic construct; identical to SEQ ID NO: 19695
  modified_base 1..243: mod_base = OTHER; note = Each t is m1f
  source 1..243: mol_type = other RNA

SEQ ID NO: 21293 - RNA, 243 nt, synthetic construct; identical to SEQ ID NO: 19696
  modified_base 1..243: mod_base = OTHER; note = Each t is m1f
  source 1..243: mol_type = other RNA

SEQ ID NO: 21294 - RNA, 243 nt, synthetic construct; identical to SEQ ID NO: 19697
  modified_base 1..243: mod_base = OTHER; note = Each t is m1f
  source 1..243: mol_type = other RNA

SEQ ID NO: 21295 - RNA, 243 nt, synthetic construct; identical to SEQ ID NO: 19698
  modified_base 1..243: mod_base = OTHER; note = Each t is m1f
  source 1..243: mol_type = other RNA

SEQ ID NO: 21296 - RNA, 243 nt, synthetic construct; identical to SEQ ID NO: 19699
  modified_base 1..243: mod_base = OTHER; note = Each t is m1f
  source 1..243: mol_type = other RNA

SEQ ID NO: 21297 - RNA, 243 nt, synthetic construct; identical to SEQ ID NO: 19700
  modified_base 1..243: mod_base = OTHER; note = Each t is m1f
  source 1..243: mol_type = other RNA

SEQ ID NO: 21298 - RNA, 243 nt, synthetic construct; identical to SEQ ID NO: 19701
  modified_base 1..243: mod_base = OTHER; note = Each t is m1f
  source 1..243: mol_type = other RNA

SEQ ID NO: 21299 - RNA, 243 nt, synthetic construct; identical to SEQ ID NO: 19702
  modified_base 1..243: mod_base = OTHER; note = Each t is m1f
  source 1..243: mol_type = other RNA

SEQ ID NO: 21300 - RNA, 243 nt, synthetic construct; identical to SEQ ID NO: 19703
  modified_base 1..243: mod_base = OTHER; note = Each t is m1f
  source 1..243: mol_type = other RNA

SEQ ID NO: 21301 - RNA, 243 nt, synthetic construct; identical to SEQ ID NO: 19704
  modified_base 1..243: mod_base = OTHER; note = Each t is m1f
  source 1..243: mol_type = other RNA

SEQ ID NO: 21302 - RNA, 243 nt, synthetic construct; identical to SEQ ID NO: 19705
  modified_base 1..243: mod_base = OTHER; note = Each t is m1f
  source 1..243: mol_type = other RNA

SEQ ID NO: 21303 - RNA, 243 nt, synthetic construct; identical to SEQ ID NO: 19706
  modified_base 1..243: mod_base = OTHER; note = Each t is m1f
  source 1..243: mol_type = other RNA

SEQ ID NO: 21304 - RNA, 243 nt, synthetic construct; identical to SEQ ID NO: 19707
  modified_base 1..243: mod_base = OTHER; note = Each t is m1f
  source 1..243: mol_type = other RNA

SEQ ID NO: 21305 - RNA, 243 nt, synthetic construct; identical to SEQ ID NO: 19708
  modified_base 1..243: mod_base = OTHER; note = Each t is m1f
  source 1..243: mol_type = other RNA

SEQ ID NO: 21306 - RNA, 243 nt, synthetic construct; identical to SEQ ID NO: 19709
  modified_base 1..243: mod_base = OTHER; note = Each t is m1f
  source 1..243: mol_type = other RNA

SEQ ID NO: 21307 - RNA, 243 nt, synthetic construct; identical to SEQ ID NO: 19710
  modified_base 1..243: mod_base = OTHER; note = Each t is m1f
  source 1..243: mol_type = other RNA

SEQ ID NO: 21308 - RNA, 243 nt, synthetic construct; identical to SEQ ID NO: 19711
  modified_base 1..243: mod_base = OTHER; note = Each t is m1f
  source 1..243: mol_type = other RNA

SEQ ID NO: 21309 - RNA, 243 nt, synthetic construct; identical to SEQ ID NO: 19712
  modified_base 1..243: mod_base = OTHER; note = Each t is m1f
  source 1..243: mol_type = other RNA

SEQ ID NO: 21310 - RNA, 243 nt, synthetic construct; identical to SEQ ID NO: 19713
  modified_base 1..243: mod_base = OTHER; note = Each t is m1f
  source 1..243: mol_type = other RNA

SEQ ID NO: 21311 - RNA, 243 nt, synthetic construct; identical to SEQ ID NO: 19714
  modified_base 1..243: mod_base = OTHER; note = Each t is m1f
  source 1..243: mol_type = other RNA

SEQ ID NO: 21312 - RNA, 243 nt, synthetic construct; identical to SEQ ID NO: 19715
  modified_base 1..243: mod_base = OTHER; note = Each t is m1f
  source 1..243: mol_type = other RNA

SEQ ID NO: 21313 - RNA, 243 nt, synthetic construct; identical to SEQ ID NO: 19716
  modified_base 1..243: mod_base = OTHER; note = Each t is m1f
  source 1..243: mol_type = other RNA

SEQ ID NO: 21314 - RNA, 243 nt, synthetic construct; identical to SEQ ID NO: 19717
  modified_base 1..243: mod_base = OTHER; note = Each t is m1f
  source 1..243: mol_type = other RNA

SEQ ID NO: 21315 - RNA, 243 nt, synthetic construct; identical to SEQ ID NO: 19718
  modified_base 1..243: mod_base = OTHER; note = Each t is m1f
  source 1..243: mol_type = other RNA

SEQ ID NO: 21316 - RNA, 243 nt, synthetic construct; identical to SEQ ID NO: 19719
  modified_base 1..243: mod_base = OTHER; note = Each t is m1f
  source 1..243: mol_type = other RNA

SEQ ID NO: 21317 - RNA, 243 nt, synthetic construct; identical to SEQ ID NO: 19720
  modified_base 1..243: mod_base = OTHER; note = Each t is m1f
  source 1..243: mol_type = other RNA

SEQ ID NO: 21318 - RNA, 243 nt, synthetic construct; identical to SEQ ID NO: 19721
  modified_base 1..243: mod_base = OTHER; note = Each t is m1f
  source 1..243: mol_type = other RNA

SEQ ID NO: 21319 - RNA, 243 nt, synthetic construct; identical to SEQ ID NO: 19722
  modified_base 1..243: mod_base = OTHER; note = Each t is m1f
  source 1..243: mol_type = other RNA

SEQ ID NO: 21320 - RNA, 243 nt, synthetic construct; identical to SEQ ID NO: 19723
  modified_base 1..243: mod_base = OTHER; note = Each t is m1f
  source 1..243: mol_type = other RNA

SEQ ID NO: 21321 - RNA, 243 nt, synthetic construct; identical to SEQ ID NO: 19724
  modified_base 1..243: mod_base = OTHER; note = Each t is m1f
  source 1..243: mol_type = other RNA

SEQ ID NO: 21322 - RNA, 243 nt, synthetic construct; identical to SEQ ID NO: 19725
  modified_base 1..243: mod_base = OTHER; note = Each t is m1f
  source 1..243: mol_type = other RNA

SEQ ID NO: 21323 - RNA, 243 nt, synthetic construct; identical to SEQ ID NO: 19726
  modified_base 1..243: mod_base = OTHER; note = Each t is m1f
  source 1..243: mol_type = other RNA

SEQ ID NO: 21324 - RNA, 243 nt, synthetic construct; identical to SEQ ID NO: 19727
  modified_base 1..243: mod_base = OTHER; note = Each t is m1f
  source 1..243: mol_type = other RNA

SEQ ID NO: 21325 - RNA, 243 nt, synthetic construct; identical to SEQ ID NO: 19728
  modified_base 1..243: mod_base = OTHER; note = Each t is m1f
  source 1..243: mol_type = other RNA

SEQ ID NO: 21326 - RNA, 243 nt, synthetic construct; identical to SEQ ID NO: 19729
  modified_base 1..243: mod_base = OTHER; note = Each t is m1f
  source 1..243: mol_type = other RNA

SEQ ID NO: 21327 - RNA, 243 nt, synthetic construct; identical to SEQ ID NO: 19730
  modified_base 1..243: mod_base = OTHER; note = Each t is m1f
  source 1..243: mol_type = other RNA

SEQ ID NO: 21328 - RNA, 243 nt, synthetic construct; identical to SEQ ID NO: 19731
  modified_base 1..243: mod_base = OTHER; note = Each t is m1f
  source 1..243: mol_type = other RNA

SEQ ID NO: 21329 - RNA, 243 nt, synthetic construct; identical to SEQ ID NO: 19732
  modified_base 1..243: mod_base = OTHER; note = Each t is m1f
  source 1..243: mol_type = other RNA

SEQ ID NO: 21330 - RNA, 243 nt, synthetic construct; identical to SEQ ID NO: 19733
  modified_base 1..243: mod_base = OTHER; note = Each t is m1f
  source 1..243: mol_type = other RNA

SEQ ID NO: 21331 - RNA, 243 nt, synthetic construct; identical to SEQ ID NO: 19734
  modified_base 1..243: mod_base = OTHER; note = Each t is m1f
  source 1..243: mol_type = other RNA

SEQ ID NO: 21332 - RNA, 243 nt, synthetic construct; identical to SEQ ID NO: 19735
  modified_base 1..243: mod_base = OTHER; note = Each t is m1f
  source 1..243: mol_type = other RNA

SEQ ID NO: 21333 - RNA, 243 nt, synthetic construct; identical to SEQ ID NO: 19736
  modified_base 1..243: mod_base = OTHER; note = Each t is m1f
  source 1..243: mol_type = other RNA

SEQ ID NO: 21334 - RNA, 243 nt, synthetic construct; identical to SEQ ID NO: 19737
  modified_base 1..243: mod_base = OTHER; note = Each t is m1f
  source 1..243: mol_type = other RNA

SEQ ID NO: 21335 - RNA, 243 nt, synthetic construct; identical to SEQ ID NO: 19738
  modified_base 1..243: mod_base = OTHER; note = Each t is m1f
  source 1..243: mol_type = other RNA

SEQ ID NO: 21336 - RNA, 243 nt, synthetic construct; identical to SEQ ID NO: 19739
  modified_base 1..243: mod_base = OTHER; note = Each t is m1f
  source 1..243: mol_type = other RNA

SEQ ID NO: 21337 - RNA, 243 nt, synthetic construct; identical to SEQ ID NO: 19740
  modified_base 1..243: mod_base = OTHER; note = Each t is m1f
  source 1..243: mol_type = other RNA

SEQ ID NO: 21338 - RNA, 243 nt, synthetic construct; identical to SEQ ID NO: 19741
  modified_base 1..243: mod_base = OTHER; note = Each t is m1f
  source 1..243: mol_type = other RNA

SEQ ID NO: 21339 - RNA, 243 nt, synthetic construct; identical to SEQ ID NO: 19742
  modified_base 1..243: mod_base = OTHER; note = Each t is m1f
  source 1..243: mol_type = other RNA

SEQ ID NO: 21340 - RNA, 243 nt, synthetic construct; identical to SEQ ID NO: 19743
  modified_base 1..243: mod_base = OTHER; note = Each t is m1f
  source 1..243: mol_type = other RNA

SEQ ID NO: 21341 - RNA, 243 nt, synthetic construct; identical to SEQ ID NO: 19744
  modified_base 1..243: mod_base = OTHER; note = Each t is m1f
  source 1..243: mol_type = other RNA

SEQ ID NO: 21342 - RNA, 243 nt, synthetic construct; identical to SEQ ID NO: 19745
  modified_base 1..243: mod_base = OTHER; note = Each t is m1f
  source 1..243: mol_type = other RNA

SEQ ID NO: 21343 - RNA, 243 nt, synthetic construct; identical to SEQ ID NO: 19746
  modified_base 1..243: mod_base = OTHER; note = Each t is m1f
  source 1..243: mol_type = other RNA

SEQ ID NO: 21344 - RNA, 243 nt, synthetic construct; identical to SEQ ID NO: 19747
  modified_base 1..243: mod_base = OTHER; note = Each t is m1f
  source 1..243: mol_type = other RNA

SEQ ID NO: 21345 - RNA, 243 nt, synthetic construct; identical to SEQ ID NO: 19748
  modified_base 1..243: mod_base = OTHER; note = Each t is m1f
  source 1..243: mol_type = other RNA

SEQ ID NO: 21346 - RNA, 243 nt, synthetic construct; identical to SEQ ID NO: 19749
  modified_base 1..243: mod_base = OTHER; note = Each t is m1f
  source 1..243: mol_type = other RNA

SEQ ID NO: 21347 - RNA, 243 nt, synthetic construct; identical to SEQ ID NO: 19750
  modified_base 1..243: mod_base = OTHER; note = Each t is m1f
  source 1..243: mol_type = other RNA

SEQ ID NO: 21348 - RNA, 243 nt, synthetic construct; identical to SEQ ID NO: 19751
  modified_base 1..243: mod_base = OTHER; note = Each t is m1f
  source 1..243: mol_type = other RNA

SEQ ID NO: 21349 - RNA, 243 nt, synthetic construct; identical to SEQ ID NO: 19752
  modified_base 1..243: mod_base = OTHER; note = Each t is m1f
  source 1..243: mol_type = other RNA

SEQ ID NO: 21350 - RNA, 243 nt, synthetic construct; identical to SEQ ID NO: 19753
  modified_base 1..243: mod_base = OTHER; note = Each t is m1f
  source 1..243: mol_type = other RNA

SEQ ID NO: 21351 - RNA, 243 nt, synthetic construct; identical to SEQ ID NO: 19754
  modified_base 1..243: mod_base = OTHER; note = Each t is m1f
  source 1..243: mol_type = other RNA

SEQ ID NO: 21352 - RNA, 243 nt, synthetic construct; identical to SEQ ID NO: 19755
  modified_base 1..243: mod_base = OTHER; note = Each t is m1f
  source 1..243: mol_type = other RNA

SEQ ID NO: 21353 - RNA, 243 nt, synthetic construct; identical to SEQ ID NO: 19756
  modified_base 1..243: mod_base = OTHER; note = Each t is m1f
  source 1..243: mol_type = other RNA

SEQ ID NO: 21354 - RNA, 243 nt, synthetic construct; identical to SEQ ID NO: 19757
  modified_base 1..243: mod_base = OTHER; note = Each t is m1f
  source 1..243: mol_type = other RNA

SEQ ID NO: 21355 - RNA, 243 nt, synthetic construct; identical to SEQ ID NO: 19758
  modified_base 1..243: mod_base = OTHER; note = Each t is m1f
  source 1..243: mol_type = other RNA

SEQ ID NO: 21356 - RNA, 243 nt, synthetic construct; identical to SEQ ID NO: 19759
  modified_base 1..243: mod_base = OTHER; note = Each t is m1f
  source 1..243: mol_type = other RNA

SEQ ID NO: 21357 - RNA, 243 nt, synthetic construct; identical to SEQ ID NO: 19760
  modified_base 1..243: mod_base = OTHER; note = Each t is m1f
  source 1..243: mol_type = other RNA

SEQ ID NO: 21358 - RNA, 243 nt, synthetic construct; identical to SEQ ID NO: 19761
  modified_base 1..243: mod_base = OTHER; note = Each t is m1f
  source 1..243: mol_type = other RNA

SEQ ID NO: 21359 - RNA, 243 nt, synthetic construct; identical to SEQ ID NO: 19762
  modified_base 1..243: mod_base = OTHER; note = Each t is m1f
  source 1..243: mol_type = other RNA

SEQ ID NO: 21360 - RNA, 243 nt, synthetic construct; identical to SEQ ID NO: 19763
  modified_base 1..243: mod_base = OTHER; note = Each t is m1f
  source 1..243: mol_type = other RNA

SEQ ID NO: 21361 - RNA, 243 nt, synthetic construct; identical to SEQ ID NO: 19764
  modified_base 1..243: mod_base = OTHER; note = Each t is m1f
  source 1..243: mol_type = other RNA

SEQ ID NO: 21362 - RNA, 243 nt, synthetic construct; identical to SEQ ID NO: 19765
  modified_base 1..243: mod_base = OTHER; note = Each t is m1f
  source 1..243: mol_type = other RNA

SEQ ID NO: 21363 - RNA, 243 nt, synthetic construct; identical to SEQ ID NO: 19766
  modified_base 1..243: mod_base = OTHER; note = Each t is m1f
  source 1..243: mol_type = other RNA

SEQ ID NO: 21364 - RNA, 243 nt, synthetic construct; identical to SEQ ID NO: 19767
  modified_base 1..243: mod_base = OTHER; note = Each t is m1f
  source 1..243: mol_type = other RNA

SEQ ID NO: 21365 - RNA, 243 nt, synthetic construct; identical to SEQ ID NO: 19768
  modified_base 1..243: mod_base = OTHER; note = Each t is m1f
  source 1..243: mol_type = other RNA

SEQ ID NO: 21366 - RNA, 243 nt, synthetic construct; identical to SEQ ID NO: 19769
  modified_base 1..243: mod_base = OTHER; note = Each t is m1f
  source 1..243: mol_type = other RNA

SEQ ID NO: 21367 - RNA, 243 nt, synthetic construct; identical to SEQ ID NO: 19770
  modified_base 1..243: mod_base = OTHER; note = Each t is m1f
  source 1..243: mol_type = other RNA

SEQ ID NO: 21368 - RNA, 243 nt, synthetic construct; identical to SEQ ID NO: 19771
  modified_base 1..243: mod_base = OTHER; note = Each t is m1f
  source 1..243: mol_type = other RNA

SEQ ID NO: 21369 - RNA, 243 nt, synthetic construct; identical to SEQ ID NO: 19772
  modified_base 1..243: mod_base = OTHER; note = Each t is m1f
  source 1..243: mol_type = other RNA

SEQ ID NO: 21370 - RNA, 243 nt, synthetic construct; identical to SEQ ID NO: 19773
  modified_base 1..243: mod_base = OTHER; note = Each t is m1f
  source 1..243: mol_type = other RNA

SEQ ID NO: 21371 - RNA, 243 nt, synthetic construct; identical to SEQ ID NO: 19774
  modified_base 1..243: mod_base = OTHER; note = Each t is m1f
  source 1..243: mol_type = other RNA

SEQ ID NO: 21372 - RNA, 243 nt, synthetic construct; identical to SEQ ID NO: 19775
  modified_base 1..243: mod_base = OTHER; note = Each t is m1f
  source 1..243: mol_type = other RNA

SEQ ID NO: 21373 - RNA, 243 nt, synthetic construct; identical to SEQ ID NO: 19776
  modified_base 1..243: mod_base = OTHER; note = Each t is m1f
  source 1..243: mol_type = other RNA

SEQ ID NO: 21374 - RNA, 243 nt, synthetic construct; identical to SEQ ID NO: 19777
  modified_base 1..243: mod_base = OTHER; note = Each t is m1f
  source 1..243: mol_type = other RNA

SEQ ID NO: 21375 - RNA, 243 nt, synthetic construct; identical to SEQ ID NO: 19778
  modified_base 1..243: mod_base = OTHER; note = Each t is m1f
  source 1..243: mol_type = other RNA

SEQ ID NO: 21376 - RNA, 243 nt, synthetic construct; identical to SEQ ID NO: 19779
  modified_base 1..243: mod_base = OTHER; note = Each t is m1f
  source 1..243: mol_type = other RNA

SEQ ID NO: 21377 - RNA, 243 nt, synthetic construct; identical to SEQ ID NO: 19780
  modified_base 1..243: mod_base = OTHER; note = Each t is m1f
  source 1..243: mol_type = other RNA

SEQ ID NO: 21378 - RNA, 243 nt, synthetic construct; identical to SEQ ID NO: 19781
  modified_base 1..243: mod_base = OTHER; note = Each t is m1f
  source 1..243: mol_type = other RNA

SEQ ID NO: 21379 - RNA, 243 nt, synthetic construct; identical to SEQ ID NO: 19782
  modified_base 1..243: mod_base = OTHER; note = Each t is m1f
  source 1..243: mol_type = other RNA

SEQ ID NO: 21380 - RNA, 243 nt, synthetic construct; identical to SEQ ID NO: 19783
  modified_base 1..243: mod_base = OTHER; note = Each t is m1f
  source 1..243: mol_type = other RNA

SEQ ID NO: 21381 - RNA, 243 nt, synthetic construct; identical to SEQ ID NO: 19784
  modified_base 1..243: mod_base = OTHER; note = Each t is m1f
  source 1..243: mol_type = other RNA

SEQ ID NO: 21382 - RNA, 243 nt, synthetic construct; identical to SEQ ID NO: 19785
  modified_base 1..243: mod_base = OTHER; note = Each t is m1f
  source 1..243: mol_type = other RNA

SEQ ID NO: 21383 - RNA, 243 nt, synthetic construct; identical to SEQ ID NO: 19786
  modified_base 1..243: mod_base = OTHER; note = Each t is m1f
  source 1..243: mol_type = other RNA

SEQ ID NO: 21384 - RNA, 243 nt, synthetic construct; identical to SEQ ID NO: 19787
  modified_base 1..243: mod_base = OTHER; note = Each t is m1f
  source 1..243: mol_type = other RNA

SEQ ID NO: 21385 - RNA, 243 nt, synthetic construct; identical to SEQ ID NO: 19788
  modified_base 1..243: mod_base = OTHER; note = Each t is m1f
  source 1..243: mol_type = other RNA

SEQ ID NO: 21386 - RNA, 243 nt, synthetic construct; identical to SEQ ID NO: 19789
  modified_base 1..243: mod_base = OTHER; note = Each t is m1f
  source 1..243: mol_type = other RNA

SEQ ID NO: 21387 - RNA, 243 nt, synthetic construct; identical to SEQ ID NO: 19790
  modified_base 1..243: mod_base = OTHER; note = Each t is m1f
  source 1..243: mol_type = other RNA

SEQ ID NO: 21388 - RNA, 243 nt, synthetic construct; identical to SEQ ID NO: 19791
  modified_base 1..243: mod_base = OTHER; note = Each t is m1f
  source 1..243: mol_type = other RNA

SEQ ID NO: 21389 - RNA, 243 nt, synthetic construct; identical to SEQ ID NO: 19792
  modified_base 1..243: mod_base = OTHER; note = Each t is m1f
  source 1..243: mol_type = other RNA

SEQ ID NO: 21390 - RNA, 243 nt, synthetic construct; identical to SEQ ID NO: 19793
  modified_base 1..243: mod_base = OTHER; note = Each t is m1f
  source 1..243: mol_type = other RNA

SEQ ID NO: 21391 - RNA, 243 nt, synthetic construct; identical to SEQ ID NO: 19794
  modified_base 1..243: mod_base = OTHER; note = Each t is m1f
  source 1..243: mol_type = other RNA

SEQ ID NO: 21392 - RNA, 243 nt, synthetic construct; identical to SEQ ID NO: 19795
  modified_base 1..243: mod_base = OTHER; note = Each t is m1f
  source 1..243: mol_type = other RNA

SEQ ID NO: 21393 - RNA, 243 nt, synthetic construct; identical to SEQ ID NO: 19796
  modified_base 1..243: mod_base = OTHER; note = Each t is m1f
  source 1..243: mol_type = other RNA

SEQ ID NO: 21394 - RNA, 243 nt, synthetic construct; identical to SEQ ID NO: 19797
  modified_base 1..243: mod_base = OTHER; note = Each t is m1f
  source 1..243: mol_type = other RNA

SEQ ID NO: 21395 - RNA, 243 nt, synthetic construct; identical to SEQ ID NO: 19798
  modified_base 1..243: mod_base = OTHER; note = Each t is m1f
  source 1..243: mol_type = other RNA

SEQ ID NO: 21396 - RNA, 243 nt, synthetic construct; identical to SEQ ID NO: 19799
  modified_base 1..243: mod_base = OTHER; note = Each t is m1f
  source 1..243: mol_type = other RNA

SEQ ID NO: 21397 - RNA, 243 nt, synthetic construct; identical to SEQ ID NO: 19800
  modified_base 1..243: mod_base = OTHER; note = Each t is m1f
  source 1..243: mol_type = other RNA

SEQ ID NO: 21398 - RNA, 243 nt, synthetic construct; identical to SEQ ID NO: 19801
  modified_base 1..243: mod_base = OTHER; note = Each t is m1f
  source 1..243: mol_type = other RNA

SEQ ID NO: 21399 - RNA, 243 nt, synthetic construct; identical to SEQ ID NO: 19802
  modified_base 1..243: mod_base = OTHER; note = Each t is m1f
  source 1..243: mol_type = other RNA

SEQ ID NO: 21400 - RNA, 243 nt, synthetic construct; identical to SEQ ID NO: 19803
  modified_base 1..243: mod_base = OTHER; note = Each t is m1f
  source 1..243: mol_type = other RNA

SEQ ID NO: 21401 - RNA, 243 nt, synthetic construct; identical to SEQ ID NO: 19804
  modified_base 1..243: mod_base = OTHER; note = Each t is m1f
  source 1..243: mol_type = other RNA

SEQ ID NO: 21402 - RNA, 243 nt, synthetic construct; identical to SEQ ID NO: 19805
  modified_base 1..243: mod_base = OTHER; note = Each t is m1f
  source 1..243: mol_type = other RNA

SEQ ID NO: 21403 - RNA, 243 nt, synthetic construct; identical to SEQ ID NO: 19806
  modified_base 1..243: mod_base = OTHER; note = Each t is m1f
  source 1..243: mol_type = other RNA

SEQ ID NO: 21404 - RNA, 243 nt, synthetic construct; identical to SEQ ID NO: 19807
  modified_base 1..243: mod_base = OTHER; note = Each t is m1f
  source 1..243: mol_type = other RNA

SEQ ID NO: 21405 - RNA, 243 nt, synthetic construct; identical to SEQ ID NO: 19808
  modified_base 1..243: mod_base = OTHER; note = Each t is m1f
  source 1..243: mol_type = other RNA

SEQ ID NO: 21406 - RNA, 243 nt, synthetic construct; identical to SEQ ID NO: 19809
  modified_base 1..243: mod_base = OTHER; note = Each t is m1f
  source 1..243: mol_type = other RNA

SEQ ID NO: 21407 - RNA, 243 nt, synthetic construct; identical to SEQ ID NO: 19810
  modified_base 1..243: mod_base = OTHER; note = Each t is m1f
  source 1..243: mol_type = other RNA

SEQ ID NO: 21408 - RNA, 243 nt, synthetic construct; identical to SEQ ID NO: 19811
  modified_base 1..243: mod_base = OTHER; note = Each t is m1f
  source 1..243: mol_type = other RNA

SEQ ID NO: 21409 - RNA, 243 nt, synthetic construct; identical to SEQ ID NO: 19812
  modified_base 1..243: mod_base = OTHER; note = Each t is m1f
  source 1..243: mol_type = other RNA

SEQ ID NO: 21410 - RNA, 243 nt, synthetic construct; identical to SEQ ID NO: 19813
  modified_base 1..243: mod_base = OTHER; note = Each t is m1f
  source 1..243: mol_type = other RNA

SEQ ID NO: 21411 - RNA, 243 nt, synthetic construct; identical to SEQ ID NO: 19814
  modified_base 1..243: mod_base = OTHER; note = Each t is m1f
  source 1..243: mol_type = other RNA

SEQ ID NO: 21412 - RNA, 243 nt, synthetic construct; identical to SEQ ID NO: 19815
  modified_base 1..243: mod_base = OTHER; note = Each t is m1f
  source 1..243: mol_type = other RNA

SEQ ID NO: 21413 - RNA, 243 nt, synthetic construct; identical to SEQ ID NO: 19816
  modified_base 1..243: mod_base = OTHER; note = Each t is m1f
  source 1..243: mol_type = other RNA

SEQ ID NO: 21414 - RNA, 243 nt, synthetic construct; identical to SEQ ID NO: 19817
  modified_base 1..243: mod_base = OTHER; note = Each t is m1f
  source 1..243: mol_type = other RNA

SEQ ID NO: 21415 - RNA, 243 nt, synthetic construct; identical to SEQ ID NO: 19818
  modified_base 1..243: mod_base = OTHER; note = Each t is m1f
  source 1..243: mol_type = other RNA

SEQ ID NO: 21416 - RNA, 243 nt, synthetic construct; identical to SEQ ID NO: 19819
  modified_base 1..243: mod_base = OTHER; note = Each t is m1f
  source 1..243: mol_type = other RNA

SEQ ID NO: 21417 - RNA, 243 nt, synthetic construct; identical to SEQ ID NO: 19820
  modified_base 1..243: mod_base = OTHER; note = Each t is m1f
  source 1..243: mol_type = other RNA

SEQ ID NO: 21418 - RNA, 243 nt, synthetic construct; identical to SEQ ID NO: 19821
  modified_base 1..243: mod_base = OTHER; note = Each t is m1f
  source 1..243: mol_type = other RNA

SEQ ID NO: 21419 - RNA, 243 nt, synthetic construct; identical to SEQ ID NO: 19822
  modified_base 1..243: mod_base = OTHER; note = Each t is m1f
  source 1..243: mol_type = other RNA

SEQ ID NO: 21420 - RNA, 243 nt, synthetic construct; identical to SEQ ID NO: 19823
  modified_base 1..243: mod_base = OTHER; note = Each t is m1f
  source 1..243: mol_type = other RNA

SEQ ID NO: 21421 - RNA, 243 nt, synthetic construct; identical to SEQ ID NO: 19824
  modified_base 1..243: mod_base = OTHER; note = Each t is m1f
  source 1..243: mol_type = other RNA

SEQ ID NO: 21422 - RNA, 243 nt, synthetic construct; identical to SEQ ID NO: 19825
  modified_base 1..243: mod_base = OTHER; note = Each t is m1f
  source 1..243: mol_type = other RNA

SEQ ID NO: 21423 - RNA, 243 nt, synthetic construct; identical to SEQ ID NO: 19826
  modified_base 1..243: mod_base = OTHER; note = Each t is m1f
  source 1..243: mol_type = other RNA

SEQ ID NO: 21424 - RNA, 243 nt, synthetic construct; identical to SEQ ID NO: 19827
  modified_base 1..243: mod_base = OTHER; note = Each t is m1f
  source 1..243: mol_type = other RNA

SEQ ID NO: 21425 - RNA, 243 nt, synthetic construct; identical to SEQ ID NO: 19828
  modified_base 1..243: mod_base = OTHER; note = Each t is m1f
  source 1..243: mol_type = other RNA

SEQ ID NO: 21426 - RNA, 243 nt, synthetic construct; identical to SEQ ID NO: 19829
  modified_base 1..243: mod_base = OTHER; note = Each t is m1f
  source 1..243: mol_type = other RNA

SEQ ID NO: 21427 - RNA, 243 nt, synthetic construct; identical to SEQ ID NO: 19830
  modified_base 1..243: mod_base = OTHER; note = Each t is m1f
  source 1..243: mol_type = other RNA

SEQ ID NO: 21428 - RNA, 243 nt, synthetic construct; identical to SEQ ID NO: 19831
  modified_base 1..243: mod_base = OTHER; note = Each t is m1f
  source 1..243: mol_type = other RNA

SEQ ID NO: 21429 - RNA, 243 nt, synthetic construct; identical to SEQ ID NO: 19832
  modified_base 1..243: mod_base = OTHER; note = Each t is m1f
  source 1..243: mol_type = other RNA

SEQ ID NO: 21430 - RNA, 243 nt, synthetic construct; identical to SEQ ID NO: 19833
  modified_base 1..243: mod_base = OTHER; note = Each t is m1f
  source 1..243: mol_type = other RNA

SEQ ID NO: 21431 - RNA, 243 nt, synthetic construct; identical to SEQ ID NO: 19834
  modified_base 1..243: mod_base = OTHER; note = Each t is m1f
  source 1..243: mol_type = other RNA

SEQ ID NO: 21432 - RNA, 243 nt, synthetic construct; identical to SEQ ID NO: 19835
  modified_base 1..243: mod_base = OTHER; note = Each t is m1f
  source 1..243: mol_type = other RNA

SEQ ID NO: 21433 - RNA, 243 nt, synthetic construct; identical to SEQ ID NO: 19836
  modified_base 1..243: mod_base = OTHER; note = Each t is m1f
  source 1..243: mol_type = other RNA

SEQ ID NO: 21434 - RNA, 243 nt, synthetic construct; identical to SEQ ID NO: 19837
  modified_base 1..243: mod_base = OTHER; note = Each t is m1f
  source 1..243: mol_type = other RNA

SEQ ID NO: 21435 - RNA, 243 nt, synthetic construct; identical to SEQ ID NO: 19838
  modified_base 1..243: mod_base = OTHER; note = Each t is m1f
  source 1..243: mol_type = other RNA

SEQ ID NO: 21436 - RNA, 243 nt, synthetic construct; identical to SEQ ID NO: 19839
  modified_base 1..243: mod_base = OTHER; note = Each t is m1f
  source 1..243: mol_type = other RNA

SEQ ID NO: 21437 - RNA, 243 nt, synthetic construct; identical to SEQ ID NO: 19840
  modified_base 1..243: mod_base = OTHER; note = Each t is m1f
  source 1..243: mol_type = other RNA

SEQ ID NO: 21438 - RNA, 243 nt, synthetic construct; identical to SEQ ID NO: 19841
  modified_base 1..243: mod_base = OTHER; note = Each t is m1f
  source 1..243: mol_type = other RNA

SEQ ID NO: 21439 - RNA, 243 nt, synthetic construct; identical to SEQ ID NO: 19842
  modified_base 1..243: mod_base = OTHER; note = Each t is m1f
  source 1..243: mol_type = other RNA

SEQ ID NO: 21440 - RNA, 243 nt, synthetic construct; identical to SEQ ID NO: 19843
  modified_base 1..243: mod_base = OTHER; note = Each t is m1f
  source 1..243: mol_type = other RNA

SEQ ID NO: 21441 - RNA, 243 nt, synthetic construct; identical to SEQ ID NO: 19844
  modified_base 1..243: mod_base = OTHER; note = Each t is m1f
  source 1..243: mol_type = other RNA

SEQ ID NO: 21442 - RNA, 243 nt, synthetic construct; identical to SEQ ID NO: 19845
  modified_base 1..243: mod_base = OTHER; note = Each t is m1f
  source 1..243: mol_type = other RNA

SEQ ID NO: 21443 - RNA, 243 nt, synthetic construct; identical to SEQ ID NO: 19846
  modified_base 1..243: mod_base = OTHER; note = Each t is m1f
  source 1..243: mol_type = other RNA

SEQ ID NO: 21444 - RNA, 243 nt, synthetic construct; identical to SEQ ID NO: 19847
  modified_base 1..243: mod_base = OTHER; note = Each t is m1f
  source 1..243: mol_type = other RNA

SEQ ID NO: 21445 - RNA, 243 nt, synthetic construct; identical to SEQ ID NO: 19848
  modified_base 1..243: mod_base = OTHER; note = Each t is m1f
  source 1..243: mol_type = other RNA

SEQ ID NO: 21446 - RNA, 243 nt, synthetic construct; identical to SEQ ID NO: 19849
  modified_base 1..243: mod_base = OTHER; note = Each t is m1f
  source 1..243: mol_type = other RNA

SEQ ID NO: 21447 - RNA, 243 nt, synthetic construct; identical to SEQ ID NO: 19850
  modified_base 1..243: mod_base = OTHER; note = Each t is m1f
  source 1..243: mol_type = other RNA

SEQ ID NO: 21448 - RNA, 243 nt, synthetic construct; identical to SEQ ID NO: 19851
  modified_base 1..243: mod_base = OTHER; note = Each t is m1f
  source 1..243: mol_type = other RNA

SEQ ID NO: 21449 - RNA, 243 nt, synthetic construct; identical to SEQ ID NO: 19852
  modified_base 1..243: mod_base = OTHER; note = Each t is m1f
  source 1..243: mol_type = other RNA

SEQ ID NO: 21450 - RNA, 243 nt, synthetic construct; identical to SEQ ID NO: 19853
  modified_base 1..243: mod_base = OTHER; note = Each t is m1f
  source 1..243: mol_type = other RNA

SEQ ID NO: 21451 - RNA, 243 nt, synthetic construct; identical to SEQ ID NO: 19854
  modified_base 1..243: mod_base = OTHER; note = Each t is m1f
  source 1..243: mol_type = other RNA

SEQ ID NO: 21452 - RNA, 243 nt, synthetic construct; identical to SEQ ID NO: 19855
  modified_base 1..243: mod_base = OTHER; note = Each t is m1f
  source 1..243: mol_type = other RNA

SEQ ID NO: 21453 - RNA, 243 nt, synthetic construct; identical to SEQ ID NO: 19856
  modified_base 1..243: mod_base = OTHER; note = Each t is m1f
  source 1..243: mol_type = other RNA

SEQ ID NO: 21454 - RNA, 243 nt, synthetic construct; identical to SEQ ID NO: 19857
  modified_base 1..243: mod_base = OTHER; note = Each t is m1f
  source 1..243: mol_type = other RNA

SEQ ID NO: 21455 - RNA, 243 nt, synthetic construct; identical to SEQ ID NO: 19858
  modified_base 1..243: mod_base = OTHER; note = Each t is m1f
  source 1..243: mol_type = other RNA

SEQ ID NO: 21456 - RNA, 243 nt, synthetic construct; identical to SEQ ID NO: 19859
  modified_base 1..243: mod_base = OTHER; note = Each t is m1f
  source 1..243: mol_type = other RNA

SEQ ID NO: 21457 - RNA, 243 nt, synthetic construct; identical to SEQ ID NO: 19860
  modified_base 1..243: mod_base = OTHER; note = Each t is m1f
  source 1..243: mol_type = other RNA

SEQ ID NO: 21458 - RNA, 243 nt, synthetic construct; identical to SEQ ID NO: 19861
  modified_base 1..243: mod_base = OTHER; note = Each t is m1f
  source 1..243: mol_type = other RNA

SEQ ID NO: 21459 - RNA, 243 nt, synthetic construct; identical to SEQ ID NO: 19862
  modified_base 1..243: mod_base = OTHER; note = Each t is m1f
  source 1..243: mol_type = other RNA

SEQ ID NO: 21460 - RNA, 243 nt, synthetic construct; identical to SEQ ID NO: 19863
  modified_base 1..243: mod_base = OTHER; note = Each t is m1f
  source 1..243: mol_type = other RNA

SEQ ID NO: 21461 - RNA, 243 nt, synthetic construct; identical to SEQ ID NO: 19864
  modified_base 1..243: mod_base = OTHER; note = Each t is m1f
  source 1..243: mol_type = other RNA

SEQ ID NO: 21462 - RNA, 243 nt, synthetic construct; identical to SEQ ID NO: 19865
  modified_base 1..243: mod_base = OTHER; note = Each t is m1f
  source 1..243: mol_type = other RNA

SEQ ID NO: 21463 - RNA, 243 nt, synthetic construct; identical to SEQ ID NO: 19866
  modified_base 1..243: mod_base = OTHER; note = Each t is m1f
  source 1..243: mol_type = other RNA

SEQ ID NO: 21464 - RNA, 243 nt, synthetic construct; identical to SEQ ID NO: 19867
  modified_base 1..243: mod_base = OTHER; note = Each t is m1f
  source 1..243: mol_type = other RNA

SEQ ID NO: 21465 - RNA, 243 nt, synthetic construct; identical to SEQ ID NO: 19868
  modified_base 1..243: mod_base = OTHER; note = Each t is m1f
  source 1..243: mol_type = other RNA

SEQ ID NO: 21466 - RNA, 243 nt, synthetic construct; identical to SEQ ID NO: 19869
  modified_base 1..243: mod_base = OTHER; note = Each t is m1f
  source 1..243: mol_type = other RNA

SEQ ID NO: 21467 - RNA, 243 nt, synthetic construct; identical to SEQ ID NO: 19870
  modified_base 1..243: mod_base = OTHER; note = Each t is m1f
  source 1..243: mol_type = other RNA

SEQ ID NO: 21468 - RNA, 243 nt, synthetic construct; identical to SEQ ID NO: 19871
  modified_base 1..243: mod_base = OTHER; note = Each t is m1f
  source 1..243: mol_type = other RNA

SEQ ID NO: 21469 - RNA, 243 nt, synthetic construct; identical to SEQ ID NO: 19872
  modified_base 1..243: mod_base = OTHER; note = Each t is m1f
  source 1..243: mol_type = other RNA

SEQ ID NO: 21470 - RNA, 243 nt, synthetic construct; identical to SEQ ID NO: 19873
  modified_base 1..243: mod_base = OTHER; note = Each t is m1f
  source 1..243: mol_type = other RNA

SEQ ID NO: 21471 - RNA, 243 nt, synthetic construct; identical to SEQ ID NO: 19874
  modified_base 1..243: mod_base = OTHER; note = Each t is m1f
  source 1..243: mol_type = other RNA

SEQ ID NO: 21472 - RNA, 243 nt, synthetic construct; identical to SEQ ID NO: 19875
  modified_base 1..243: mod_base = OTHER; note = Each t is m1f
  source 1..243: mol_type = other RNA

SEQ ID NO: 21473 - RNA, 243 nt, synthetic construct; identical to SEQ ID NO: 19876
  modified_base 1..243: mod_base = OTHER; note = Each t is m1f
  source 1..243: mol_type = other RNA

SEQ ID NO: 21474 - RNA, 243 nt, synthetic construct; identical to SEQ ID NO: 19877
  modified_base 1..243: mod_base = OTHER; note = Each t is m1f
  source 1..243: mol_type = other RNA

SEQ ID NO: 21475 - RNA, 243 nt, synthetic construct; identical to SEQ ID NO: 19878
  modified_base 1..243: mod_base = OTHER; note = Each t is m1f
  source 1..243: mol_type = other RNA

SEQ ID NO: 21476 - RNA, 243 nt, synthetic construct; identical to SEQ ID NO: 19879
  modified_base 1..243: mod_base = OTHER; note = Each t is m1f
  source 1..243: mol_type = other RNA

SEQ ID NO: 21477 - RNA, 243 nt, synthetic construct; identical to SEQ ID NO: 19880
  modified_base 1..243: mod_base = OTHER; note = Each t is m1f
  source 1..243: mol_type = other RNA

SEQ ID NO: 21478 - RNA, 243 nt, synthetic construct; identical to SEQ ID NO: 19881
  modified_base 1..243: mod_base = OTHER; note = Each t is m1f
  source 1..243: mol_type = other RNA

SEQ ID NO: 21479 - RNA, 243 nt, synthetic construct; identical to SEQ ID NO: 19882
  modified_base 1..243: mod_base = OTHER; note = Each t is m1f
  source 1..243: mol_type = other RNA

SEQ ID NO: 21480 - RNA, 243 nt, synthetic construct; identical to SEQ ID NO: 19883
  modified_base 1..243: mod_base = OTHER; note = Each t is m1f
  source 1..243: mol_type = other RNA

SEQ ID NO: 21481 - RNA, 243 nt, synthetic construct; identical to SEQ ID NO: 19884
  modified_base 1..243: mod_base = OTHER; note = Each t is m1f
  source 1..243: mol_type = other RNA

SEQ ID NO: 21482 - RNA, 243 nt, synthetic construct; identical to SEQ ID NO: 19885
  modified_base 1..243: mod_base = OTHER; note = Each t is m1f
  source 1..243: mol_type = other RNA

SEQ ID NO: 21483 - RNA, 243 nt, synthetic construct; identical to SEQ ID NO: 19886
  modified_base 1..243: mod_base = OTHER; note = Each t is m1f
  source 1..243: mol_type = other RNA

SEQ ID NO: 21484 - RNA, 243 nt, synthetic construct; identical to SEQ ID NO: 19887
  modified_base 1..243: mod_base = OTHER; note = Each t is m1f
  source 1..243: mol_type = other RNA

SEQ ID NO: 21485 - RNA, 243 nt, synthetic construct; identical to SEQ ID NO: 19888
  modified_base 1..243: mod_base = OTHER; note = Each t is m1f
  source 1..243: mol_type = other RNA

SEQ ID NO: 21486 - RNA, 243 nt, synthetic construct; identical to SEQ ID NO: 19889
  modified_base 1..243: mod_base = OTHER; note = Each t is m1f
  source 1..243: mol_type = other RNA

SEQ ID NO: 21487 - RNA, 243 nt, synthetic construct; identical to SEQ ID NO: 19890
  modified_base 1..243: mod_base = OTHER; note = Each t is m1f
  source 1..243: mol_type = other RNA

SEQ ID NO: 21488 - RNA, 243 nt, synthetic construct; identical to SEQ ID NO: 19891
  modified_base 1..243: mod_base = OTHER; note = Each t is m1f
  source 1..243: mol_type = other RNA

SEQ ID NO: 21489 - RNA, 243 nt, synthetic construct; identical to SEQ ID NO: 19892
  modified_base 1..243: mod_base = OTHER; note = Each t is m1f
  source 1..243: mol_type = other RNA

SEQ ID NO: 21490 - RNA, 243 nt, synthetic construct; identical to SEQ ID NO: 19893
  modified_base 1..243: mod_base = OTHER; note = Each t is m1f
  source 1..243: mol_type = other RNA

SEQ ID NO: 21491 - RNA, 243 nt, synthetic construct; identical to SEQ ID NO: 19894
  modified_base 1..243: mod_base = OTHER; note = Each t is m1f
  source 1..243: mol_type = other RNA

SEQ ID NO: 21492 - RNA, 243 nt, synthetic construct; identical to SEQ ID NO: 19895
  modified_base 1..243: mod_base = OTHER; note = Each t is m1f
  source 1..243: mol_type = other RNA

SEQ ID NO: 21493 - RNA, 243 nt, synthetic construct; identical to SEQ ID NO: 19896
  modified_base 1..243: mod_base = OTHER; note = Each t is m1f
  source 1..243: mol_type = other RNA

SEQ ID NO: 21494 - RNA, 243 nt, synthetic construct; identical to SEQ ID NO: 19897
  modified_base 1..243: mod_base = OTHER; note = Each t is m1f
  source 1..243: mol_type = other RNA

SEQ ID NO: 21495 - RNA, 243 nt, synthetic construct; identical to SEQ ID NO: 19898
  modified_base 1..243: mod_base = OTHER; note = Each t is m1f
  source 1..243: mol_type = other RNA

SEQ ID NO: 21496 - RNA, 243 nt, synthetic construct; identical to SEQ ID NO: 19899
  modified_base 1..243: mod_base = OTHER; note = Each t is m1f
  source 1..243: mol_type = other RNA

SEQ ID NO: 21497 - RNA, 243 nt, synthetic construct; identical to SEQ ID NO: 19900
  modified_base 1..243: mod_base = OTHER; note = Each t is m1f
  source 1..243: mol_type = other RNA

SEQ ID NO: 21498 - RNA, 243 nt, synthetic construct; identical to SEQ ID NO: 19901
  modified_base 1..243: mod_base = OTHER; note = Each t is m1f
  source 1..243: mol_type = other RNA

SEQ ID NO: 21499 - RNA, 243 nt, synthetic construct; identical to SEQ ID NO: 19902
  modified_base 1..243: mod_base = OTHER; note = Each t is m1f
  source 1..243: mol_type = other RNA

SEQ ID NO: 21500 - RNA, 243 nt, synthetic construct; identical to SEQ ID NO: 19903
  modified_base 1..243: mod_base = OTHER; note = Each t is m1f
  source 1..243: mol_type = other RNA

SEQ ID NO: 21501 - RNA, 243 nt, synthetic construct; identical to SEQ ID NO: 19904
  modified_base 1..243: mod_base = OTHER; note = Each t is m1f
  source 1..243: mol_type = other RNA

SEQ ID NO: 21502 - RNA, 243 nt, synthetic construct; identical to SEQ ID NO: 19905
  modified_base 1..243: mod_base = OTHER; note = Each t is m1f
  source 1..243: mol_type = other RNA

SEQ ID NO: 21503 - RNA, 243 nt, synthetic construct; identical to SEQ ID NO: 19906
  modified_base 1..243: mod_base = OTHER; note = Each t is m1f
  source 1..243: mol_type = other RNA

SEQ ID NO: 21504 - RNA, 243 nt, synthetic construct; identical to SEQ ID NO: 19907
  modified_base 1..243: mod_base = OTHER; note = Each t is m1f
  source 1..243: mol_type = other RNA

SEQ ID NO: 21505 - RNA, 243 nt, synthetic construct; identical to SEQ ID NO: 19908
  modified_base 1..243: mod_base = OTHER; note = Each t is m1f
  source 1..243: mol_type = other RNA

SEQ ID NO: 21506 - RNA, 243 nt, synthetic construct; identical to SEQ ID NO: 19909
  modified_base 1..243: mod_base = OTHER; note = Each t is m1f
  source 1..243: mol_type = other RNA

SEQ ID NO: 21507 - RNA, 243 nt, synthetic construct; identical to SEQ ID NO: 19910
  modified_base 1..243: mod_base = OTHER; note = Each t is m1f
  source 1..243: mol_type = other RNA

SEQ ID NO: 21508 - RNA, 243 nt, synthetic construct; identical to SEQ ID NO: 19911
  modified_base 1..243: mod_base = OTHER; note = Each t is m1f
  source 1..243: mol_type = other RNA

SEQ ID NO: 21509 - RNA, 243 nt, synthetic construct; identical to SEQ ID NO: 19912
  modified_base 1..243: mod_base = OTHER; note = Each t is m1f
  source 1..243: mol_type = other RNA

SEQ ID NO: 21510 - RNA, 243 nt, synthetic construct; identical to SEQ ID NO: 19913
  modified_base 1..243: mod_base = OTHER; note = Each t is m1f
  source 1..243: mol_type = other RNA

SEQ ID NO: 21511 - RNA, 243 nt, synthetic construct; identical to SEQ ID NO: 19914
  modified_base 1..243: mod_base = OTHER; note = Each t is m1f
  source 1..243: mol_type = other RNA

SEQ ID NO: 21512 - RNA, 243 nt, synthetic construct; identical to SEQ ID NO: 19915
  modified_base 1..243: mod_base = OTHER; note = Each t is m1f
  source 1..243: mol_type = other RNA

SEQ ID NO: 21513 - RNA, 243 nt, synthetic construct; identical to SEQ ID NO: 19916
  modified_base 1..243: mod_base = OTHER; note = Each t is m1f
  source 1..243: mol_type = other RNA

SEQ ID NO: 21514 - RNA, 243 nt, synthetic construct; identical to SEQ ID NO: 19917
  modified_base 1..243: mod_base = OTHER; note = Each t is m1f
  source 1..243: mol_type = other RNA

SEQ ID NO: 21515 - RNA, 243 nt, synthetic construct; identical to SEQ ID NO: 19918
  modified_base 1..243: mod_base = OTHER; note = Each t is m1f
  source 1..243: mol_type = other RNA

SEQ ID NO: 21516 - RNA, 243 nt, synthetic construct; identical to SEQ ID NO: 19919
  modified_base 1..243: mod_base = OTHER; note = Each t is m1f
  source 1..243: mol_type = other RNA

SEQ ID NO: 21517 - RNA, 243 nt, synthetic construct; identical to SEQ ID NO: 19920
  modified_base 1..243: mod_base = OTHER; note = Each t is m1f
  source 1..243: mol_type = other RNA

SEQ ID NO: 21518 - RNA, 243 nt, synthetic construct; identical to SEQ ID NO: 19921
  modified_base 1..243: mod_base = OTHER; note = Each t is m1f
  source 1..243: mol_type = other RNA

SEQ ID NO: 21519 - RNA, 243 nt, synthetic construct; identical to SEQ ID NO: 19922
  modified_base 1..243: mod_base = OTHER; note = Each t is m1f
  source 1..243: mol_type = other RNA

SEQ ID NO: 21520 - RNA, 243 nt, synthetic construct; identical to SEQ ID NO: 19923
  modified_base 1..243: mod_base = OTHER; note = Each t is m1f
  source 1..243: mol_type = other RNA

SEQ ID NO: 21521 - RNA, 243 nt, synthetic construct; identical to SEQ ID NO: 19924
  modified_base 1..243: mod_base = OTHER; note = Each t is m1f
  source 1..243: mol_type = other RNA

SEQ ID NO: 21522 - RNA, 243 nt, synthetic construct; identical to SEQ ID NO: 19925
  modified_base 1..243: mod_base = OTHER; note = Each t is m1f
  source 1..243: mol_type = other RNA

SEQ ID NO: 21523 - RNA, 243 nt, synthetic construct; identical to SEQ ID NO: 19926
  modified_base 1..243: mod_base = OTHER; note = Each t is m1f
  source 1..243: mol_type = other RNA

SEQ ID NO: 21524 - RNA, 243 nt, synthetic construct; identical to SEQ ID NO: 19927
  modified_base 1..243: mod_base = OTHER; note = Each t is m1f
  source 1..243: mol_type = other RNA

SEQ ID NO: 21525 - RNA, 243 nt, synthetic construct; identical to SEQ ID NO: 19928
  modified_base 1..243: mod_base = OTHER; note = Each t is m1f
  source 1..243: mol_type = other RNA

SEQ ID NO: 21526 - RNA, 243 nt, synthetic construct; identical to SEQ ID NO: 19929
  modified_base 1..243: mod_base = OTHER; note = Each t is m1f
  source 1..243: mol_type = other RNA

SEQ ID NO: 21527 - RNA, 243 nt, synthetic construct; identical to SEQ ID NO: 19930
  modified_base 1..243: mod_base = OTHER; note = Each t is m1f
  source 1..243: mol_type = other RNA

SEQ ID NO: 21528 - RNA, 243 nt, synthetic construct; identical to SEQ ID NO: 19931
  modified_base 1..243: mod_base = OTHER; note = Each t is m1f
  source 1..243: mol_type = other RNA

SEQ ID NO: 21529 - RNA, 243 nt, synthetic construct; identical to SEQ ID NO: 19932
  modified_base 1..243: mod_base = OTHER; note = Each t is m1f
  source 1..243: mol_type = other RNA

SEQ ID NO: 21530 - RNA, 243 nt, synthetic construct; identical to SEQ ID NO: 19933
  modified_base 1..243: mod_base = OTHER; note = Each t is m1f
  source 1..243: mol_type = other RNA

SEQ ID NO: 21531 - RNA, 243 nt, synthetic construct; identical to SEQ ID NO: 19934
  modified_base 1..243: mod_base = OTHER; note = Each t is m1f
  source 1..243: mol_type = other RNA

SEQ ID NO: 21532 - RNA, 243 nt, synthetic construct; identical to SEQ ID NO: 19935
  modified_base 1..243: mod_base = OTHER; note = Each t is m1f
  source 1..243: mol_type = other RNA

SEQ ID NO: 21533 - RNA, 243 nt, synthetic construct; identical to SEQ ID NO: 19936
  modified_base 1..243: mod_base = OTHER; note = Each t is m1f
  source 1..243: mol_type = other RNA

SEQ ID NO: 21534 - RNA, 243 nt, synthetic construct; identical to SEQ ID NO: 19937
  modified_base 1..243: mod_base = OTHER; note = Each t is m1f
  source 1..243: mol_type = other RNA

SEQ ID NO: 21535 - RNA, 243 nt, synthetic construct; identical to SEQ ID NO: 19938
  modified_base 1..243: mod_base = OTHER; note = Each t is m1f
  source 1..243: mol_type = other RNA

SEQ ID NO: 21536 - RNA, 243 nt, synthetic construct; identical to SEQ ID NO: 19939
  modified_base 1..243: mod_base = OTHER; note = Each t is m1f
  source 1..243: mol_type = other RNA

SEQ ID NO: 21537 - RNA, 243 nt, synthetic construct; identical to SEQ ID NO: 19940
  modified_base 1..243: mod_base = OTHER; note = Each t is m1f
  source 1..243: mol_type = other RNA

SEQ ID NO: 21538 - RNA, 243 nt, synthetic construct; identical to SEQ ID NO: 19941
  modified_base 1..243: mod_base = OTHER; note = Each t is m1f
  source 1..243: mol_type = other RNA

SEQ ID NO: 21539 - RNA, 243 nt, synthetic construct; identical to SEQ ID NO: 19942
  modified_base 1..243: mod_base = OTHER; note = Each t is m1f
  source 1..243: mol_type = other RNA

SEQ ID NO: 21540 - RNA, 243 nt, synthetic construct; identical to SEQ ID NO: 19943
  modified_base 1..243: mod_base = OTHER; note = Each t is m1f
  source 1..243: mol_type = other RNA

SEQ ID NO: 21541 - RNA, 243 nt, synthetic construct; identical to SEQ ID NO: 19944
  modified_base 1..243: mod_base = OTHER; note = Each t is m1f
  source 1..243: mol_type = other RNA

SEQ ID NO: 21542 - RNA, 243 nt, synthetic construct; identical to SEQ ID NO: 19945
  modified_base 1..243: mod_base = OTHER; note = Each t is m1f
  source 1..243: mol_type = other RNA

SEQ ID NO: 21543 - RNA, 243 nt, synthetic construct; identical to SEQ ID NO: 19946
  modified_base 1..243: mod_base = OTHER; note = Each t is m1f
  source 1..243: mol_type = other RNA

SEQ ID NO: 21544 - RNA, 243 nt, synthetic construct; identical to SEQ ID NO: 19947
  modified_base 1..243: mod_base = OTHER; note = Each t is m1f
  source 1..243: mol_type = other RNA

SEQ ID NO: 21545 - RNA, 243 nt, synthetic construct; identical to SEQ ID NO: 19948
  modified_base 1..243: mod_base = OTHER; note = Each t is m1f
  source 1..243: mol_type = other RNA

SEQ ID NO: 21546 - RNA, 243 nt, synthetic construct; identical to SEQ ID NO: 19949
  modified_base 1..243: mod_base = OTHER; note = Each t is m1f
  source 1..243: mol_type = other RNA

SEQ ID NO: 21547 - RNA, 243 nt, synthetic construct; identical to SEQ ID NO: 19950
  modified_base 1..243: mod_base = OTHER; note = Each t is m1f
  source 1..243: mol_type = other RNA

SEQ ID NO: 21548 - RNA, 243 nt, synthetic construct; identical to SEQ ID NO: 19951
  modified_base 1..243: mod_base = OTHER; note = Each t is m1f
  source 1..243: mol_type = other RNA

SEQ ID NO: 21549 - RNA, 243 nt, synthetic construct; identical to SEQ ID NO: 19952
  modified_base 1..243: mod_base = OTHER; note = Each t is m1f
  source 1..243: mol_type = other RNA

SEQ ID NO: 21550 - RNA, 243 nt, synthetic construct; identical to SEQ ID NO: 19953
  modified_base 1..243: mod_base = OTHER; note = Each t is m1f
  source 1..243: mol_type = other RNA

SEQ ID NO: 21551 - RNA, 243 nt, synthetic construct; identical to SEQ ID NO: 19954
  modified_base 1..243: mod_base = OTHER; note = Each t is m1f
  source 1..243: mol_type = other RNA

SEQ ID NO: 21552 - RNA, 243 nt, synthetic construct; identical to SEQ ID NO: 19955
  modified_base 1..243: mod_base = OTHER; note = Each t is m1f
  source 1..243: mol_type = other RNA

SEQ ID NO: 21553 - RNA, 243 nt, synthetic construct; identical to SEQ ID NO: 19956
  modified_base 1..243: mod_base = OTHER; note = Each t is m1f
  source 1..243: mol_type = other RNA

SEQ ID NO: 21554 - RNA, 243 nt, synthetic construct; identical to SEQ ID NO: 19957
  modified_base 1..243: mod_base = OTHER; note = Each t is m1f
  source 1..243: mol_type = other RNA

SEQ ID NO: 21555 - RNA, 243 nt, synthetic construct; identical to SEQ ID NO: 19958
  modified_base 1..243: mod_base = OTHER; note = Each t is m1f
  source 1..243: mol_type = other RNA

SEQ ID NO: 21556 - RNA, 243 nt, synthetic construct; identical to SEQ ID NO: 19959
  modified_base 1..243: mod_base = OTHER; note = Each t is m1f
  source 1..243: mol_type = other RNA

SEQ ID NO: 21557 - RNA, 243 nt, synthetic construct; identical to SEQ ID NO: 19960
  modified_base 1..243: mod_base = OTHER; note = Each t is m1f
  source 1..243: mol_type = other RNA

SEQ ID NO: 21558 - RNA, 243 nt, synthetic construct; identical to SEQ ID NO: 19961
  modified_base 1..243: mod_base = OTHER; note = Each t is m1f
  source 1..243: mol_type = other RNA

SEQ ID NO: 21559 - RNA, 243 nt, synthetic construct; identical to SEQ ID NO: 19962
  modified_base 1..243: mod_base = OTHER; note = Each t is m1f
  source 1..243: mol_type = other RNA

SEQ ID NO: 21560 - RNA, 243 nt, synthetic construct; identical to SEQ ID NO: 19963
  modified_base 1..243: mod_base = OTHER; note = Each t is m1f
  source 1..243: mol_type = other RNA

SEQ ID NO: 21561 - RNA, 243 nt, synthetic construct; identical to SEQ ID NO: 19964
  modified_base 1..243: mod_base = OTHER; note = Each t is m1f
  source 1..243: mol_type = other RNA

SEQ ID NO: 21562 - RNA, 243 nt, synthetic construct; identical to SEQ ID NO: 19965
  modified_base 1..243: mod_base = OTHER; note = Each t is m1f
  source 1..243: mol_type = other RNA

SEQ ID NO: 21563 - RNA, 243 nt, synthetic construct; identical to SEQ ID NO: 19966
  modified_base 1..243: mod_base = OTHER; note = Each t is m1f
  source 1..243: mol_type = other RNA

SEQ ID NO: 21564 - RNA, 243 nt, synthetic construct; identical to SEQ ID NO: 19967
  modified_base 1..243: mod_base = OTHER; note = Each t is m1f
  source 1..243: mol_type = other RNA

SEQ ID NO: 21565 - RNA, 243 nt, synthetic construct; identical to SEQ ID NO: 19968
  modified_base 1..243: mod_base = OTHER; note = Each t is m1f
  source 1..243: mol_type = other RNA

SEQ ID NO: 21566 - RNA, 243 nt, synthetic construct; identical to SEQ ID NO: 19969
  modified_base 1..243: mod_base = OTHER; note = Each t is m1f
  source 1..243: mol_type = other RNA

SEQ ID NO: 21567 - RNA, 243 nt, synthetic construct; identical to SEQ ID NO: 19970
  modified_base 1..243: mod_base = OTHER; note = Each t is m1f
  source 1..243: mol_type = other RNA

SEQ ID NO: 21568 - RNA, 243 nt, synthetic construct; identical to SEQ ID NO: 19971
  modified_base 1..243: mod_base = OTHER; note = Each t is m1f
  source 1..243: mol_type = other RNA

SEQ ID NO: 21569 - RNA, 243 nt, synthetic construct; identical to SEQ ID NO: 19972
  modified_base 1..243: mod_base = OTHER; note = Each t is m1f
  source 1..243: mol_type = other RNA

SEQ ID NO: 21570 - RNA, 243 nt, synthetic construct; identical to SEQ ID NO: 19973
  modified_base 1..243: mod_base = OTHER; note = Each t is m1f
  source 1..243: mol_type = other RNA

SEQ ID NO: 21571 - RNA, 243 nt, synthetic construct; identical to SEQ ID NO: 19974
  modified_base 1..243: mod_base = OTHER; note = Each t is m1f
  source 1..243: mol_type = other RNA

SEQ ID NO: 21572 - RNA, 243 nt, synthetic construct; identical to SEQ ID NO: 19975
  modified_base 1..243: mod_base = OTHER; note = Each t is m1f
  source 1..243: mol_type = other RNA

SEQ ID NO: 21573 - RNA, 243 nt, synthetic construct; identical to SEQ ID NO: 19976
  modified_base 1..243: mod_base = OTHER; note = Each t is m1f
  source 1..243: mol_type = other RNA

SEQ ID NO: 21574 - RNA, 243 nt, synthetic construct; identical to SEQ ID NO: 19977
  modified_base 1..243: mod_base = OTHER; note = Each t is m1f
  source 1..243: mol_type = other RNA

SEQ ID NO: 21575 - RNA, 243 nt, synthetic construct; identical to SEQ ID NO: 19978
  modified_base 1..243: mod_base = OTHER; note = Each t is m1f
  source 1..243: mol_type = other RNA

SEQ ID NO: 21576 - RNA, 243 nt, synthetic construct; identical to SEQ ID NO: 19979
  modified_base 1..243: mod_base = OTHER; note = Each t is m1f
  source 1..243: mol_type = other RNA

SEQ ID NO: 21577 - RNA, 243 nt, synthetic construct; identical to SEQ ID NO: 19980
  modified_base 1..243: mod_base = OTHER; note = Each t is m1f
  source 1..243: mol_type = other RNA

SEQ ID NO: 21578 - RNA, 243 nt, synthetic construct; identical to SEQ ID NO: 19981
  modified_base 1..243: mod_base = OTHER; note = Each t is m1f
  source 1..243: mol_type = other RNA

SEQ ID NO: 21579 - RNA, 243 nt, synthetic construct; identical to SEQ ID NO: 19982
  modified_base 1..243: mod_base = OTHER; note = Each t is m1f
  source 1..243: mol_type = other RNA

SEQ ID NO: 21580 - RNA, 243 nt, synthetic construct; identical to SEQ ID NO: 19983
  modified_base 1..243: mod_base = OTHER; note = Each t is m1f
  source 1..243: mol_type = other RNA

SEQ ID NO: 21581 - RNA, 243 nt, synthetic construct; identical to SEQ ID NO: 19984
  modified_base 1..243: mod_base = OTHER; note = Each t is m1f
  source 1..243: mol_type = other RNA

SEQ ID NO: 21582 - RNA, 243 nt, synthetic construct; identical to SEQ ID NO: 19985
  modified_base 1..243: mod_base = OTHER; note = Each t is m1f
  source 1..243: mol_type = other RNA

SEQ ID NO: 21583 - RNA, 243 nt, synthetic construct; identical to SEQ ID NO: 19986
  modified_base 1..243: mod_base = OTHER; note = Each t is m1f
  source 1..243: mol_type = other RNA

SEQ ID NO: 21584 - RNA, 243 nt, synthetic construct; identical to SEQ ID NO: 19987
  modified_base 1..243: mod_base = OTHER; note = Each t is m1f
  source 1..243: mol_type = other RNA

SEQ ID NO: 21585 - RNA, 243 nt, synthetic construct; identical to SEQ ID NO: 19988
  modified_base 1..243: mod_base = OTHER; note = Each t is m1f
  source 1..243: mol_type = other RNA

SEQ ID NO: 21586 - RNA, 243 nt, synthetic construct; identical to SEQ ID NO: 19989
  modified_base 1..243: mod_base = OTHER; note = Each t is m1f
  source 1..243: mol_type = other RNA

SEQ ID NO: 21587 - RNA, 243 nt, synthetic construct; identical to SEQ ID NO: 19990
  modified_base 1..243: mod_base = OTHER; note = Each t is m1f
  source 1..243: mol_type = other RNA

SEQ ID NO: 21588 - RNA, 243 nt, synthetic construct; identical to SEQ ID NO: 19991
  modified_base 1..243: mod_base = OTHER; note = Each t is m1f
  source 1..243: mol_type = other RNA

SEQ ID NO: 21589 - RNA, 243 nt, synthetic construct; identical to SEQ ID NO: 19992
  modified_base 1..243: mod_base = OTHER; note = Each t is m1f
  source 1..243: mol_type = other RNA

SEQ ID NO: 21590 - RNA, 243 nt, synthetic construct; identical to SEQ ID NO: 19993
  modified_base 1..243: mod_base = OTHER; note = Each t is m1f
  source 1..243: mol_type = other RNA

SEQ ID NO: 21591 - RNA, 243 nt, synthetic construct; identical to SEQ ID NO: 19994
  modified_base 1..243: mod_base = OTHER; note = Each t is m1f
  source 1..243: mol_type = other RNA

SEQ ID NO: 21592 - RNA, 243 nt, synthetic construct; identical to SEQ ID NO: 19995
  modified_base 1..243: mod_base = OTHER; note = Each t is m1f
  source 1..243: mol_type = other RNA

SEQ ID NO: 21593 - RNA, 243 nt, synthetic construct; identical to SEQ ID NO: 19996
  modified_base 1..243: mod_base = OTHER; note = Each t is m1f
  source 1..243: mol_type = other RNA

SEQ ID NO: 21594 - RNA, 243 nt, synthetic construct; identical to SEQ ID NO: 19997
  modified_base 1..243: mod_base = OTHER; note = Each t is m1f
  source 1..243: mol_type = other RNA

SEQ ID NO: 21595 - RNA, 243 nt, synthetic construct; identical to SEQ ID NO: 19998
  modified_base 1..243: mod_base = OTHER; note = Each t is m1f
  source 1..243: mol_type = other RNA

SEQ ID NO: 21596 - RNA, 243 nt, synthetic construct; identical to SEQ ID NO: 19999
  modified_base 1..243: mod_base = OTHER; note = Each t is m1f
  source 1..243: mol_type = other RNA

SEQ ID NO: 21597 - RNA, 243 nt, synthetic construct; identical to SEQ ID NO: 20000
  modified_base 1..243: mod_base = OTHER; note = Each t is m1f
  source 1..243: mol_type = other RNA

SEQ ID NO: 21598 - RNA, 243 nt, synthetic construct; identical to SEQ ID NO: 20001
  modified_base 1..243: mod_base = OTHER; note = Each t is m1f
  source 1..243: mol_type = other RNA

SEQ ID NO: 21599 - RNA, 243 nt, synthetic construct; identical to SEQ ID NO: 20002
  modified_base 1..243: mod_base = OTHER; note = Each t is m1f
  source 1..243: mol_type = other RNA

SEQ ID NO: 21600 - RNA, 243 nt, synthetic construct; identical to SEQ ID NO: 20003
  modified_base 1..243: mod_base = OTHER; note = Each t is m1f
  source 1..243: mol_type = other RNA

SEQ ID NO: 21601 - RNA, 243 nt, synthetic construct; identical to SEQ ID NO: 20004
  modified_base 1..243: mod_base = OTHER; note = Each t is m1f
  source 1..243: mol_type = other RNA

SEQ ID NO: 21602 - RNA, 243 nt, synthetic construct; identical to SEQ ID NO: 20005
  modified_base 1..243: mod_base = OTHER; note = Each t is m1f
  source 1..243: mol_type = other RNA

SEQ ID NO: 21603 - RNA, 243 nt, synthetic construct; identical to SEQ ID NO: 20006
  modified_base 1..243: mod_base = OTHER; note = Each t is m1f
  source 1..243: mol_type = other RNA

SEQ ID NO: 21604 - RNA, 243 nt, synthetic construct; identical to SEQ ID NO: 20007
  modified_base 1..243: mod_base = OTHER; note = Each t is m1f
  source 1..243: mol_type = other RNA

SEQ ID NO: 21605 - RNA, 243 nt, synthetic construct; identical to SEQ ID NO: 20008
  modified_base 1..243: mod_base = OTHER; note = Each t is m1f
  source 1..243: mol_type = other RNA

SEQ ID NO: 21606 - RNA, 243 nt, synthetic construct; identical to SEQ ID NO: 20009
  modified_base 1..243: mod_base = OTHER; note = Each t is m1f
  source 1..243: mol_type = other RNA

SEQ ID NO: 21607 - RNA, 243 nt, synthetic construct; identical to SEQ ID NO: 20010
  modified_base 1..243: mod_base = OTHER; note = Each t is m1f
  source 1..243: mol_type = other RNA

SEQ ID NO: 21608 - RNA, 243 nt, synthetic construct; identical to SEQ ID NO: 20011
  modified_base 1..243: mod_base = OTHER; note = Each t is m1f
  source 1..243: mol_type = other RNA

SEQ ID NO: 21609 - RNA, 243 nt, synthetic construct; identical to SEQ ID NO: 20012
  modified_base 1..243: mod_base = OTHER; note = Each t is m1f
  source 1..243: mol_type = other RNA

SEQ ID NO: 21610 - RNA, 243 nt, synthetic construct; identical to SEQ ID NO: 20013
  modified_base 1..243: mod_base = OTHER; note = Each t is m1f
  source 1..243: mol_type = other RNA

SEQ ID NO: 21611 - RNA, 243 nt, synthetic construct; identical to SEQ ID NO: 20014
  modified_base 1..243: mod_base = OTHER; note = Each t is m1f
  source 1..243: mol_type = other RNA

SEQ ID NO: 21612 - RNA, 243 nt, synthetic construct; identical to SEQ ID NO: 20015
  modified_base 1..243: mod_base = OTHER; note = Each t is m1f
  source 1..243: mol_type = other RNA

SEQ ID NO: 21613 - RNA, 243 nt, synthetic construct; identical to SEQ ID NO: 20016
  modified_base 1..243: mod_base = OTHER; note = Each t is m1f
  source 1..243: mol_type = other RNA

SEQ ID NO: 21614 - RNA, 243 nt, synthetic construct; identical to SEQ ID NO: 20017
  modified_base 1..243: mod_base = OTHER; note = Each t is m1f
  source 1..243: mol_type = other RNA

SEQ ID NO: 21615 - RNA, 243 nt, synthetic construct; identical to SEQ ID NO: 20018
  modified_base 1..243: mod_base = OTHER; note = Each t is m1f
  source 1..243: mol_type = other RNA

SEQ ID NO: 21616 - RNA, 243 nt, synthetic construct; identical to SEQ ID NO: 20019
  modified_base 1..243: mod_base = OTHER; note = Each t is m1f
  source 1..243: mol_type = other RNA

SEQ ID NO: 21617 - RNA, 243 nt, synthetic construct; identical to SEQ ID NO: 20020
  modified_base 1..243: mod_base = OTHER; note = Each t is m1f
  source 1..243: mol_type = other RNA

SEQ ID NO: 21618 - RNA, 243 nt, synthetic construct; identical to SEQ ID NO: 20021
  modified_base 1..243: mod_base = OTHER; note = Each t is m1f
  source 1..243: mol_type = other RNA

SEQ ID NO: 21619 - RNA, 243 nt, synthetic construct; identical to SEQ ID NO: 20022
  modified_base 1..243: mod_base = OTHER; note = Each t is m1f
  source 1..243: mol_type = other RNA

SEQ ID NO: 21620 - RNA, 243 nt, synthetic construct; identical to SEQ ID NO: 20023
  modified_base 1..243: mod_base = OTHER; note = Each t is m1f
  source 1..243: mol_type = other RNA

SEQ ID NO: 21621 - RNA, 243 nt, synthetic construct; identical to SEQ ID NO: 20024
  modified_base 1..243: mod_base = OTHER; note = Each t is m1f
  source 1..243: mol_type = other RNA

SEQ ID NO: 21622 - RNA, 243 nt, synthetic construct; identical to SEQ ID NO: 20025
  modified_base 1..243: mod_base = OTHER; note = Each t is m1f
  source 1..243: mol_type = other RNA

SEQ ID NO: 21623 - RNA, 243 nt, synthetic construct; identical to SEQ ID NO: 20026
  modified_base 1..243: mod_base = OTHER; note = Each t is m1f
  source 1..243: mol_type = other RNA

SEQ ID NO: 21624 - RNA, 243 nt, synthetic construct; identical to SEQ ID NO: 20027
  modified_base 1..243: mod_base = OTHER; note = Each t is m1f
  source 1..243: mol_type = other RNA

SEQ ID NO: 21625 - RNA, 243 nt, synthetic construct; identical to SEQ ID NO: 20028
  modified_base 1..243: mod_base = OTHER; note = Each t is m1f
  source 1..243: mol_type = other RNA

SEQ ID NO: 21626 - RNA, 243 nt, synthetic construct; identical to SEQ ID NO: 20029
  modified_base 1..243: mod_base = OTHER; note = Each t is m1f
  source 1..243: mol_type = other RNA

SEQ ID NO: 21627 - RNA, 243 nt, synthetic construct; identical to SEQ ID NO: 20030
  modified_base 1..243: mod_base = OTHER; note = Each t is m1f
  source 1..243: mol_type = other RNA

SEQ ID NO: 21628 - RNA, 243 nt, synthetic construct; identical to SEQ ID NO: 20031
  modified_base 1..243: mod_base = OTHER; note = Each t is m1f
  source 1..243: mol_type = other RNA

SEQ ID NO: 21629 - RNA, 243 nt, synthetic construct; identical to SEQ ID NO: 20032
  modified_base 1..243: mod_base = OTHER; note = Each t is m1f
  source 1..243: mol_type = other RNA

SEQ ID NO: 21630 - RNA, 243 nt, synthetic construct; identical to SEQ ID NO: 20033
  modified_base 1..243: mod_base = OTHER; note = Each t is m1f
  source 1..243: mol_type = other RNA

SEQ ID NO: 21631 - RNA, 243 nt, synthetic construct; identical to SEQ ID NO: 20034
  modified_base 1..243: mod_base = OTHER; note = Each t is m1f
  source 1..243: mol_type = other RNA

SEQ ID NO: 21632 - RNA, 243 nt, synthetic construct; identical to SEQ ID NO: 20035
  modified_base 1..243: mod_base = OTHER; note = Each t is m1f
  source 1..243: mol_type = other RNA

SEQ ID NO: 21633 - RNA, 243 nt, synthetic construct; identical to SEQ ID NO: 20036
  modified_base 1..243: mod_base = OTHER; note = Each t is m1f
  source 1..243: mol_type = other RNA

SEQ ID NO: 21634 - RNA, 243 nt, synthetic construct; identical to SEQ ID NO: 20037
  modified_base 1..243: mod_base = OTHER; note = Each t is m1f
  source 1..243: mol_type = other RNA

SEQ ID NO: 21635 - RNA, 243 nt, synthetic construct; identical to SEQ ID NO: 20038
  modified_base 1..243: mod_base = OTHER; note = Each t is m1f
  source 1..243: mol_type = other RNA

SEQ ID NO: 21636 - RNA, 243 nt, synthetic construct; identical to SEQ ID NO: 20039
  modified_base 1..243: mod_base = OTHER; note = Each t is m1f
  source 1..243: mol_type = other RNA

SEQ ID NO: 21637 - RNA, 243 nt, synthetic construct; identical to SEQ ID NO: 20040
  modified_base 1..243: mod_base = OTHER; note = Each t is m1f
  source 1..243: mol_type = other RNA

SEQ ID NO: 21638 - RNA, 243 nt, synthetic construct; identical to SEQ ID NO: 20041
  modified_base 1..243: mod_base = OTHER; note = Each t is m1f
  source 1..243: mol_type = other RNA

SEQ ID NO: 21639 - RNA, 243 nt, synthetic construct; identical to SEQ ID NO: 20042
  modified_base 1..243: mod_base = OTHER; note = Each t is m1f
  source 1..243: mol_type = other RNA

SEQ ID NO: 21640 - RNA, 243 nt, synthetic construct; identical to SEQ ID NO: 20043
  modified_base 1..243: mod_base = OTHER; note = Each t is m1f
  source 1..243: mol_type = other RNA

SEQ ID NO: 21641 - RNA, 243 nt, synthetic construct; identical to SEQ ID NO: 20044
  modified_base 1..243: mod_base = OTHER; note = Each t is m1f
  source 1..243: mol_type = other RNA

SEQ ID NO: 21642 - RNA, 243 nt, synthetic construct; identical to SEQ ID NO: 20045
  modified_base 1..243: mod_base = OTHER; note = Each t is m1f
  source 1..243: mol_type = other RNA

SEQ ID NO: 21643 - RNA, 243 nt, synthetic construct; identical to SEQ ID NO: 20046
  modified_base 1..243: mod_base = OTHER; note = Each t is m1f
  source 1..243: mol_type = other RNA

SEQ ID NO: 21644 - RNA, 243 nt, synthetic construct; identical to SEQ ID NO: 20047
  modified_base 1..243: mod_base = OTHER; note = Each t is m1f
  source 1..243: mol_type = other RNA

SEQ ID NO: 21645 - RNA, 243 nt, synthetic construct; identical to SEQ ID NO: 20048
  modified_base 1..243: mod_base = OTHER; note = Each t is m1f
  source 1..243: mol_type = other RNA

SEQ ID NO: 21646 - RNA, 243 nt, synthetic construct; identical to SEQ ID NO: 20049
  modified_base 1..243: mod_base = OTHER; note = Each t is m1f
  source 1..243: mol_type = other RNA

SEQ ID NO: 21647 - RNA, 243 nt, synthetic construct; identical to SEQ ID NO: 20050
  modified_base 1..243: mod_base = OTHER; note = Each t is m1f
  source 1..243: mol_type = other RNA

SEQ ID NO: 21648 - RNA, 243 nt, synthetic construct; identical to SEQ ID NO: 20051
  modified_base 1..243: mod_base = OTHER; note = Each t is m1f
  source 1..243: mol_type = other RNA

SEQ ID NO: 21649 - RNA, 243 nt, synthetic construct; identical to SEQ ID NO: 20052
  modified_base 1..243: mod_base = OTHER; note = Each t is m1f
  source 1..243: mol_type = other RNA

SEQ ID NO: 21650 - RNA, 243 nt, synthetic construct; identical to SEQ ID NO: 20053
  modified_base 1..243: mod_base = OTHER; note = Each t is m1f
  source 1..243: mol_type = other RNA

SEQ ID NO: 21651 - RNA, 243 nt, synthetic construct; identical to SEQ ID NO: 20054
  modified_base 1..243: mod_base = OTHER; note = Each t is m1f
  source 1..243: mol_type = other RNA

SEQ ID NO: 21652 - RNA, 243 nt, synthetic construct; identical to SEQ ID NO: 20055
  modified_base 1..243: mod_base = OTHER; note = Each t is m1f
  source 1..243: mol_type = other RNA

SEQ ID NO: 21653 - RNA, 243 nt, synthetic construct; identical to SEQ ID NO: 20056
  modified_base 1..243: mod_base = OTHER; note = Each t is m1f
  source 1..243: mol_type = other RNA

SEQ ID NO: 21654 - RNA, 243 nt, synthetic construct; identical to SEQ ID NO: 20057
  modified_base 1..243: mod_base = OTHER; note = Each t is m1f
  source 1..243: mol_type = other RNA

SEQ ID NO: 21655 - RNA, 243 nt, synthetic construct; identical to SEQ ID NO: 20058
  modified_base 1..243: mod_base = OTHER; note = Each t is m1f
  source 1..243: mol_type = other RNA

SEQ ID NO: 21656 - RNA, 243 nt, synthetic construct; identical to SEQ ID NO: 20059
  modified_base 1..243: mod_base = OTHER; note = Each t is m1f
  source 1..243: mol_type = other RNA

SEQ ID NO: 21657 - RNA, 243 nt, synthetic construct; identical to SEQ ID NO: 20060
  modified_base 1..243: mod_base = OTHER; note = Each t is m1f
  source 1..243: mol_type = other RNA

SEQ ID NO: 21658 - RNA, 243 nt, synthetic construct; identical to SEQ ID NO: 20061
  modified_base 1..243: mod_base = OTHER; note = Each t is m1f
  source 1..243: mol_type = other RNA

SEQ ID NO: 21659 - RNA, 243 nt, synthetic construct; identical to SEQ ID NO: 20062
  modified_base 1..243: mod_base = OTHER; note = Each t is m1f
  source 1..243: mol_type = other RNA

SEQ ID NO: 21660 - RNA, 243 nt, synthetic construct; identical to SEQ ID NO: 20063
  modified_base 1..243: mod_base = OTHER; note = Each t is m1f
  source 1..243: mol_type = other RNA

SEQ ID NO: 21661 - RNA, 243 nt, synthetic construct; identical to SEQ ID NO: 20064
  modified_base 1..243: mod_base = OTHER; note = Each t is m1f
  source 1..243: mol_type = other RNA

SEQ ID NO: 21662 - RNA, 243 nt, synthetic construct; identical to SEQ ID NO: 20065
  modified_base 1..243: mod_base = OTHER; note = Each t is m1f
  source 1..243: mol_type = other RNA

SEQ ID NO: 21663 - RNA, 243 nt, synthetic construct; identical to SEQ ID NO: 20066
  modified_base 1..243: mod_base = OTHER; note = Each t is m1f
  source 1..243: mol_type = other RNA

SEQ ID NO: 21664 - RNA, 243 nt, synthetic construct; identical to SEQ ID NO: 20067
  modified_base 1..243: mod_base = OTHER; note = Each t is m1f
  source 1..243: mol_type = other RNA

SEQ ID NO: 21665 - RNA, 243 nt, synthetic construct; identical to SEQ ID NO: 20068
  modified_base 1..243: mod_base = OTHER; note = Each t is m1f
  source 1..243: mol_type = other RNA

SEQ ID NO: 21666 - RNA, 243 nt, synthetic construct; identical to SEQ ID NO: 20069
  modified_base 1..243: mod_base = OTHER; note = Each t is m1f
  source 1..243: mol_type = other RNA

SEQ ID NO: 21667 - RNA, 243 nt, synthetic construct; identical to SEQ ID NO: 20070
  modified_base 1..243: mod_base = OTHER; note = Each t is m1f
  source 1..243: mol_type = other RNA

SEQ ID NO: 21668 - RNA, 243 nt, synthetic construct; identical to SEQ ID NO: 20071
  modified_base 1..243: mod_base = OTHER; note = Each t is m1f
  source 1..243: mol_type = other RNA

SEQ ID NO: 21669 - RNA, 243 nt, synthetic construct; identical to SEQ ID NO: 20072
  modified_base 1..243: mod_base = OTHER; note = Each t is m1f
  source 1..243: mol_type = other RNA

SEQ ID NO: 21670 - RNA, 243 nt, synthetic construct; identical to SEQ ID NO: 20073
  modified_base 1..243: mod_base = OTHER; note = Each t is m1f
  source 1..243: mol_type = other RNA

SEQ ID NO: 21671 - RNA, 240 nt, synthetic construct; identical to SEQ ID NO: 20074
  modified_base 1..240: mod_base = OTHER; note = Each t is m1f
  source 1..240: mol_type = other RNA

SEQ ID NO: 21672 - RNA, 243 nt, synthetic construct; identical to SEQ ID NO: 20075
  modified_base 1..243: mod_base = OTHER; note = Each t is m1f
  source 1..243: mol_type = other RNA

SEQ ID NO: 21673 - RNA, 243 nt, synthetic construct; identical to SEQ ID NO: 20076
  modified_base 1..243: mod_base = OTHER; note = Each t is m1f
  source 1..243: mol_type = other RNA

SEQ ID NO: 21674 - RNA, 243 nt, synthetic construct; identical to SEQ ID NO: 20077
  modified_base 1..243: mod_base = OTHER; note = Each t is m1f
  source 1..243: mol_type = other RNA

SEQ ID NO: 21675 - RNA, 243 nt, synthetic construct; identical to SEQ ID NO: 20078
  modified_base 1..243: mod_base = OTHER; note = Each t is m1f
  source 1..243: mol_type = other RNA

SEQ ID NO: 21676 - RNA, 243 nt, synthetic construct; identical to SEQ ID NO: 20079
  modified_base 1..243: mod_base = OTHER; note = Each t is m1f
  source 1..243: mol_type = other RNA

SEQ ID NO: 21677 - RNA, 243 nt, synthetic construct; identical to SEQ ID NO: 20080
  modified_base 1..243: mod_base = OTHER; note = Each t is m1f
  source 1..243: mol_type = other RNA

SEQ ID NO: 21678 - RNA, 243 nt, synthetic construct; identical to SEQ ID NO: 20081
  modified_base 1..243: mod_base = OTHER; note = Each t is m1f
  source 1..243: mol_type = other RNA

SEQ ID NO: 21679 - RNA, 243 nt, synthetic construct; identical to SEQ ID NO: 20082
  modified_base 1..243: mod_base = OTHER; note = Each t is m1f
  source 1..243: mol_type = other RNA

SEQ ID NO: 21680 - RNA, 243 nt, synthetic construct; identical to SEQ ID NO: 20083
  modified_base 1..243: mod_base = OTHER; note = Each t is m1f
  source 1..243: mol_type = other RNA

SEQ ID NO: 21681 - RNA, 243 nt, synthetic construct; identical to SEQ ID NO: 20084
  modified_base 1..243: mod_base = OTHER; note = Each t is m1f
  source 1..243: mol_type = other RNA

SEQ ID NO: 21682 - RNA, 243 nt, synthetic construct; identical to SEQ ID NO: 20085
  modified_base 1..243: mod_base = OTHER; note = Each t is m1f
  source 1..243: mol_type = other RNA

SEQ ID NO: 21683 - RNA, 243 nt, synthetic construct; identical to SEQ ID NO: 20086
  modified_base 1..243: mod_base = OTHER; note = Each t is m1f
  source 1..243: mol_type = other RNA

SEQ ID NO: 21684 - RNA, 243 nt, synthetic construct; identical to SEQ ID NO: 20087
  modified_base 1..243: mod_base = OTHER; note = Each t is m1f
  source 1..243: mol_type = other RNA

SEQ ID NO: 21685 - RNA, 243 nt, synthetic construct; identical to SEQ ID NO: 20088
  modified_base 1..243: mod_base = OTHER; note = Each t is m1f
  source 1..243: mol_type = other RNA

SEQ ID NO: 21686 - RNA, 243 nt, synthetic construct; identical to SEQ ID NO: 20089
  modified_base 1..243: mod_base = OTHER; note = Each t is m1f
  source 1..243: mol_type = other RNA

SEQ ID NO: 21687 - RNA, 243 nt, synthetic construct; identical to SEQ ID NO: 20090
  modified_base 1..243: mod_base = OTHER; note = Each t is m1f
  source 1..243: mol_type = other RNA

SEQ ID NO: 21688 - RNA, 243 nt, synthetic construct; identical to SEQ ID NO: 20091
  modified_base 1..243: mod_base = OTHER; note = Each t is m1f
  source 1..243: mol_type = other RNA

SEQ ID NO: 21689 - RNA, 243 nt, synthetic construct; identical to SEQ ID NO: 20092
  modified_base 1..243: mod_base = OTHER; note = Each t is m1f
  source 1..243: mol_type = other RNA

SEQ ID NO: 21690 - RNA, 243 nt, synthetic construct; identical to SEQ ID NO: 20093
  modified_base 1..243: mod_base = OTHER; note = Each t is m1f
  source 1..243: mol_type = other RNA

SEQ ID NO: 21691 - RNA, 243 nt, synthetic construct; identical to SEQ ID NO: 20094
  modified_base 1..243: mod_base = OTHER; note = Each t is m1f
  source 1..243: mol_type = other RNA

SEQ ID NO: 21692 - RNA, 243 nt, synthetic construct; identical to SEQ ID NO: 20095
  modified_base 1..243: mod_base = OTHER; note = Each t is m1f
  source 1..243: mol_type = other RNA

SEQ ID NO: 21693 - RNA, 243 nt, synthetic construct; identical to SEQ ID NO: 20096
  modified_base 1..243: mod_base = OTHER; note = Each t is m1f
  source 1..243: mol_type = other RNA

SEQ ID NO: 21694 - RNA, 243 nt, synthetic construct; identical to SEQ ID NO: 20097
  modified_base 1..243: mod_base = OTHER; note = Each t is m1f
  source 1..243: mol_type = other RNA

SEQ ID NO: 21695 - RNA, 243 nt, synthetic construct; identical to SEQ ID NO: 20098
  modified_base 1..243: mod_base = OTHER; note = Each t is m1f
  source 1..243: mol_type = other RNA

SEQ ID NO: 21696 - RNA, 243 nt, synthetic construct; identical to SEQ ID NO: 20099
  modified_base 1..243: mod_base = OTHER; note = Each t is m1f
  source 1..243: mol_type = other RNA

SEQ ID NO: 21697 - RNA, 243 nt, synthetic construct; identical to SEQ ID NO: 20100
  modified_base 1..243: mod_base = OTHER; note = Each t is m1f
  source 1..243: mol_type = other RNA

SEQ ID NO: 21698 - RNA, 243 nt, synthetic construct; identical to SEQ ID NO: 20101
  modified_base 1..243: mod_base = OTHER; note = Each t is m1f
  source 1..243: mol_type = other RNA

SEQ ID NO: 21699 - RNA, 243 nt, synthetic construct; identical to SEQ ID NO: 20102
  modified_base 1..243: mod_base = OTHER; note = Each t is m1f
  source 1..243: mol_type = other RNA

SEQ ID NO: 21700 - RNA, 243 nt, synthetic construct; identical to SEQ ID NO: 20103
  modified_base 1..243: mod_base = OTHER; note = Each t is m1f
  source 1..243: mol_type = other RNA

SEQ ID NO: 21701 - RNA, 243 nt, synthetic construct; identical to SEQ ID NO: 20104
  modified_base 1..243: mod_base = OTHER; note = Each t is m1f
  source 1..243: mol_type = other RNA

SEQ ID NO: 21702 - RNA, 243 nt, synthetic construct; identical to SEQ ID NO: 20105
  modified_base 1..243: mod_base = OTHER; note = Each t is m1f
  source 1..243: mol_type = other RNA

SEQ ID NO: 21703 - RNA, 243 nt, synthetic construct; identical to SEQ ID NO: 20106
  modified_base 1..243: mod_base = OTHER; note = Each t is m1f
  source 1..243: mol_type = other RNA

SEQ ID NO: 21704 - RNA, 243 nt, synthetic construct; identical to SEQ ID NO: 20107
  modified_base 1..243: mod_base = OTHER; note = Each t is m1f
  source 1..243: mol_type = other RNA

SEQ ID NO: 21705 - RNA, 243 nt, synthetic construct; identical to SEQ ID NO: 20108
  modified_base 1..243: mod_base = OTHER; note = Each t is m1f
  source 1..243: mol_type = other RNA

SEQ ID NO: 21706 - RNA, 243 nt, synthetic construct; identical to SEQ ID NO: 20109
  modified_base 1..243: mod_base = OTHER; note = Each t is m1f
  source 1..243: mol_type = other RNA

SEQ ID NO: 21707 - RNA, 243 nt, synthetic construct; identical to SEQ ID NO: 20110
  modified_base 1..243: mod_base = OTHER; note = Each t is m1f
  source 1..243: mol_type = other RNA

SEQ ID NO: 21708 - RNA, 243 nt, synthetic construct; identical to SEQ ID NO: 20111
  modified_base 1..243: mod_base = OTHER; note = Each t is m1f
  source 1..243: mol_type = other RNA

SEQ ID NO: 21709 - RNA, 243 nt, synthetic construct; identical to SEQ ID NO: 20112
  modified_base 1..243: mod_base = OTHER; note = Each t is m1f
  source 1..243: mol_type = other RNA

SEQ ID NO: 21710 - RNA, 243 nt, synthetic construct; identical to SEQ ID NO: 20113
  modified_base 1..243: mod_base = OTHER; note = Each t is m1f
  source 1..243: mol_type = other RNA

SEQ ID NO: 21711 - RNA, 243 nt, synthetic construct; identical to SEQ ID NO: 20114
  modified_base 1..243: mod_base = OTHER; note = Each t is m1f
  source 1..243: mol_type = other RNA

SEQ ID NO: 21712 - RNA, 243 nt, synthetic construct; identical to SEQ ID NO: 20115
  modified_base 1..243: mod_base = OTHER; note = Each t is m1f
  source 1..243: mol_type = other RNA

SEQ ID NO: 21713 - RNA, 243 nt, synthetic construct; identical to SEQ ID NO: 20116
  modified_base 1..243: mod_base = OTHER; note = Each t is m1f
  source 1..243: mol_type = other RNA

SEQ ID NO: 21714 - RNA, 243 nt, synthetic construct; identical to SEQ ID NO: 20117
  modified_base 1..243: mod_base = OTHER; note = Each t is m1f
  source 1..243: mol_type = other RNA

SEQ ID NO: 21715 - RNA, 243 nt, synthetic construct; identical to SEQ ID NO: 20118
  modified_base 1..243: mod_base = OTHER; note = Each t is m1f
  source 1..243: mol_type = other RNA

SEQ ID NO: 21716 - RNA, 243 nt, synthetic construct; identical to SEQ ID NO: 20119
  modified_base 1..243: mod_base = OTHER; note = Each t is m1f
  source 1..243: mol_type = other RNA

SEQ ID NO: 21717 - RNA, 243 nt, synthetic construct; identical to SEQ ID NO: 20120
  modified_base 1..243: mod_base = OTHER; note = Each t is m1f
  source 1..243: mol_type = other RNA

SEQ ID NO: 21718 - RNA, 243 nt, synthetic construct; identical to SEQ ID NO: 20121
  modified_base 1..243: mod_base = OTHER; note = Each t is m1f
  source 1..243: mol_type = other RNA

SEQ ID NO: 21719 - RNA, 243 nt, synthetic construct; identical to SEQ ID NO: 20122
  modified_base 1..243: mod_base = OTHER; note = Each t is m1f
  source 1..243: mol_type = other RNA

SEQ ID NO: 21720 - RNA, 243 nt, synthetic construct; identical to SEQ ID NO: 20123
  modified_base 1..243: mod_base = OTHER; note = Each t is m1f
  source 1..243: mol_type = other RNA

SEQ ID NO: 21721 - RNA, 243 nt, synthetic construct; identical to SEQ ID NO: 20124
  modified_base 1..243: mod_base = OTHER; note = Each t is m1f
  source 1..243: mol_type = other RNA

SEQ ID NO: 21722 - RNA, 243 nt, synthetic construct; identical to SEQ ID NO: 20125
  modified_base 1..243: mod_base = OTHER; note = Each t is m1f
  source 1..243: mol_type = other RNA

SEQ ID NO: 21723 - RNA, 243 nt, synthetic construct; identical to SEQ ID NO: 20126
  modified_base 1..243: mod_base = OTHER; note = Each t is m1f
  source 1..243: mol_type = other RNA

SEQ ID NO: 21724 - RNA, 243 nt, synthetic construct; identical to SEQ ID NO: 20127
  modified_base 1..243: mod_base = OTHER; note = Each t is m1f
  source 1..243: mol_type = other RNA

SEQ ID NO: 21725 - RNA, 243 nt, synthetic construct; identical to SEQ ID NO: 20128
  modified_base 1..243: mod_base = OTHER; note = Each t is m1f
  source 1..243: mol_type = other RNA

SEQ ID NO: 21726 - RNA, 243 nt, synthetic construct; identical to SEQ ID NO: 20129
  modified_base 1..243: mod_base = OTHER; note = Each t is m1f
  source 1..243: mol_type = other RNA

SEQ ID NO: 21727 - RNA, 243 nt, synthetic construct; identical to SEQ ID NO: 20130
  modified_base 1..243: mod_base = OTHER; note = Each t is m1f
  source 1..243: mol_type = other RNA

SEQ ID NO: 21728 - RNA, 243 nt, synthetic construct; identical to SEQ ID NO: 20131
  modified_base 1..243: mod_base = OTHER; note = Each t is m1f
  source 1..243: mol_type = other RNA

SEQ ID NO: 21729 - RNA, 243 nt, synthetic construct; identical to SEQ ID NO: 20132
  modified_base 1..243: mod_base = OTHER; note = Each t is m1f
  source 1..243: mol_type = other RNA

SEQ ID NO: 21730 - RNA, 243 nt, synthetic construct; identical to SEQ ID NO: 20133
  modified_base 1..243: mod_base = OTHER; note = Each t is m1f
  source 1..243: mol_type = other RNA

SEQ ID NO: 21731 - RNA, 243 nt, synthetic construct; identical to SEQ ID NO: 20134
  modified_base 1..243: mod_base = OTHER; note = Each t is m1f
  source 1..243: mol_type = other RNA

SEQ ID NO: 21732 - RNA, 243 nt, synthetic construct; identical to SEQ ID NO: 20135
  modified_base 1..243: mod_base = OTHER; note = Each t is m1f
  source 1..243: mol_type = other RNA

SEQ ID NO: 21733 - RNA, 243 nt, synthetic construct; identical to SEQ ID NO: 20136
  modified_base 1..243: mod_base = OTHER; note = Each t is m1f
  source 1..243: mol_type = other RNA

SEQ ID NO: 21734 - RNA, 243 nt, synthetic construct; identical to SEQ ID NO: 20137
  modified_base 1..243: mod_base = OTHER; note = Each t is m1f
  source 1..243: mol_type = other RNA

SEQ ID NO: 21735 - RNA, 243 nt, synthetic construct; identical to SEQ ID NO: 20138
  modified_base 1..243: mod_base = OTHER; note = Each t is m1f
  source 1..243: mol_type = other RNA

SEQ ID NO: 21736 - RNA, 243 nt, synthetic construct; identical to SEQ ID NO: 20139
  modified_base 1..243: mod_base = OTHER; note = Each t is m1f
  source 1..243: mol_type = other RNA

SEQ ID NO: 21737 - RNA, 243 nt, synthetic construct; identical to SEQ ID NO: 20140
  modified_base 1..243: mod_base = OTHER; note = Each t is m1f
  source 1..243: mol_type = other RNA

SEQ ID NO: 21738 - RNA, 243 nt, synthetic construct; identical to SEQ ID NO: 20141
  modified_base 1..243: mod_base = OTHER; note = Each t is m1f
  source 1..243: mol_type = other RNA

SEQ ID NO: 21739 - RNA, 243 nt, synthetic construct; identical to SEQ ID NO: 20142
  modified_base 1..243: mod_base = OTHER; note = Each t is m1f
  source 1..243: mol_type = other RNA

SEQ ID NO: 21740 - RNA, 243 nt, synthetic construct; identical to SEQ ID NO: 20143
  modified_base 1..243: mod_base = OTHER; note = Each t is m1f
  source 1..243: mol_type = other RNA

SEQ ID NO: 21741 - RNA, 243 nt, synthetic construct; identical to SEQ ID NO: 20144
  modified_base 1..243: mod_base = OTHER; note = Each t is m1f
  source 1..243: mol_type = other RNA

SEQ ID NO: 21742 - RNA, 243 nt, synthetic construct; identical to SEQ ID NO: 20145
  modified_base 1..243: mod_base = OTHER; note = Each t is m1f
  source 1..243: mol_type = other RNA

SEQ ID NO: 21743 - RNA, 243 nt, synthetic construct; identical to SEQ ID NO: 20146
  modified_base 1..243: mod_base = OTHER; note = Each t is m1f
  source 1..243: mol_type = other RNA

SEQ ID NO: 21744 - RNA, 243 nt, synthetic construct; identical to SEQ ID NO: 20147
  modified_base 1..243: mod_base = OTHER; note = Each t is m1f
  source 1..243: mol_type = other RNA

SEQ ID NO: 21745 - RNA, 243 nt, synthetic construct; identical to SEQ ID NO: 20148
  modified_base 1..243: mod_base = OTHER; note = Each t is m1f
  source 1..243: mol_type = other RNA

SEQ ID NO: 21746 - RNA, 243 nt, synthetic construct; identical to SEQ ID NO: 20149
  modified_base 1..243: mod_base = OTHER; note = Each t is m1f
  source 1..243: mol_type = other RNA

SEQ ID NO: 21747 - RNA, 243 nt, synthetic construct; identical to SEQ ID NO: 20150
  modified_base 1..243: mod_base = OTHER; note = Each t is m1f
  source 1..243: mol_type = other RNA

SEQ ID NO: 21748 - RNA, 243 nt, synthetic construct; identical to SEQ ID NO: 20151
  modified_base 1..243: mod_base = OTHER; note = Each t is m1f
  source 1..243: mol_type = other RNA

SEQ ID NO: 21749 - RNA, 243 nt, synthetic construct; identical to SEQ ID NO: 20152
  modified_base 1..243: mod_base = OTHER; note = Each t is m1f
  source 1..243: mol_type = other RNA

SEQ ID NO: 21750 - RNA, 243 nt, synthetic construct; identical to SEQ ID NO: 20153
  modified_base 1..243: mod_base = OTHER; note = Each t is m1f
  source 1..243: mol_type = other RNA

SEQ ID NO: 21751 - RNA, 243 nt, synthetic construct; identical to SEQ ID NO: 20154
  modified_base 1..243: mod_base = OTHER; note = Each t is m1f
  source 1..243: mol_type = other RNA

SEQ ID NO: 21752 - RNA, 243 nt, synthetic construct; identical to SEQ ID NO: 20155
  modified_base 1..243: mod_base = OTHER; note = Each t is m1f
  source 1..243: mol_type = other RNA

SEQ ID NO: 21753 - RNA, 243 nt, synthetic construct; identical to SEQ ID NO: 20156
  modified_base 1..243: mod_base = OTHER; note = Each t is m1f
  source 1..243: mol_type = other RNA

SEQ ID NO: 21754 - RNA, 243 nt, synthetic construct; identical to SEQ ID NO: 20157
  modified_base 1..243: mod_base = OTHER; note = Each t is m1f
  source 1..243: mol_type = other RNA

SEQ ID NO: 21755 - RNA, 243 nt, synthetic construct; identical to SEQ ID NO: 20158
  modified_base 1..243: mod_base = OTHER; note = Each t is m1f
  source 1..243: mol_type = other RNA

SEQ ID NO: 21756 - RNA, 243 nt, synthetic construct; identical to SEQ ID NO: 20159
  modified_base 1..243: mod_base = OTHER; note = Each t is m1f
  source 1..243: mol_type = other RNA

SEQ ID NO: 21757 - RNA, 243 nt, synthetic construct; identical to SEQ ID NO: 20160
  modified_base 1..243: mod_base = OTHER; note = Each t is m1f
  source 1..243: mol_type = other RNA

SEQ ID NO: 21758 - RNA, 243 nt, synthetic construct; identical to SEQ ID NO: 20161
  modified_base 1..243: mod_base = OTHER; note = Each t is m1f
  source 1..243: mol_type = other RNA

SEQ ID NO: 21759 - RNA, 243 nt, synthetic construct; identical to SEQ ID NO: 20162
  modified_base 1..243: mod_base = OTHER; note = Each t is m1f
  source 1..243: mol_type = other RNA

SEQ ID NO: 21760 - RNA, 243 nt, synthetic construct; identical to SEQ ID NO: 20163
  modified_base 1..243: mod_base = OTHER; note = Each t is m1f
  source 1..243: mol_type = other RNA

SEQ ID NO: 21761 - RNA, 243 nt, synthetic construct; identical to SEQ ID NO: 20164
  modified_base 1..243: mod_base = OTHER; note = Each t is m1f
  source 1..243: mol_type = other RNA

SEQ ID NO: 21762 - RNA, 243 nt, synthetic construct; identical to SEQ ID NO: 20165
  modified_base 1..243: mod_base = OTHER; note = Each t is m1f
  source 1..243: mol_type = other RNA

SEQ ID NO: 21763 - RNA, 243 nt, synthetic construct; identical to SEQ ID NO: 20166
  modified_base 1..243: mod_base = OTHER; note = Each t is m1f
  source 1..243: mol_type = other RNA

SEQ ID NO: 21764 - RNA, 243 nt, synthetic construct; identical to SEQ ID NO: 20167
  modified_base 1..243: mod_base = OTHER; note = Each t is m1f
  source 1..243: mol_type = other RNA

SEQ ID NO: 21765 - RNA, 243 nt, synthetic construct; identical to SEQ ID NO: 20168
  modified_base 1..243: mod_base = OTHER; note = Each t is m1f
  source 1..243: mol_type = other RNA

SEQ ID NO: 21766 - RNA, 243 nt, synthetic construct; identical to SEQ ID NO: 20169
  modified_base 1..243: mod_base = OTHER; note = Each t is m1f
  source 1..243: mol_type = other RNA

SEQ ID NO: 21767 - RNA, 243 nt, synthetic construct; identical to SEQ ID NO: 20170
  modified_base 1..243: mod_base = OTHER; note = Each t is m1f
  source 1..243: mol_type = other RNA

SEQ ID NO: 21768 - RNA, 243 nt, synthetic construct; identical to SEQ ID NO: 20171
  modified_base 1..243: mod_base = OTHER; note = Each t is m1f
  source 1..243: mol_type = other RNA

SEQ ID NO: 21769 - RNA, 243 nt, synthetic construct; identical to SEQ ID NO: 20172
  modified_base 1..243: mod_base = OTHER; note = Each t is m1f
  source 1..243: mol_type = other RNA

SEQ ID NO: 21770 - RNA, 243 nt, synthetic construct; identical to SEQ ID NO: 20173
  modified_base 1..243: mod_base = OTHER; note = Each t is m1f
  source 1..243: mol_type = other RNA

SEQ ID NO: 21771 - RNA, 243 nt, synthetic construct; identical to SEQ ID NO: 20174
  modified_base 1..243: mod_base = OTHER; note = Each t is m1f
  source 1..243: mol_type = other RNA

SEQ ID NO: 21772 - RNA, 243 nt, synthetic construct; identical to SEQ ID NO: 20175
  modified_base 1..243: mod_base = OTHER; note = Each t is m1f
  source 1..243: mol_type = other RNA

SEQ ID NO: 21773 - RNA, 243 nt, synthetic construct; identical to SEQ ID NO: 20176
  modified_base 1..243: mod_base = OTHER; note = Each t is m1f
  source 1..243: mol_type = other RNA

SEQ ID NO: 21774 - RNA, 243 nt, synthetic construct; identical to SEQ ID NO: 20177
  modified_base 1..243: mod_base = OTHER; note = Each t is m1f
  source 1..243: mol_type = other RNA

SEQ ID NO: 21775 - RNA, 243 nt, synthetic construct; identical to SEQ ID NO: 20178
  modified_base 1..243: mod_base = OTHER; note = Each t is m1f
  source 1..243: mol_type = other RNA

SEQ ID NO: 21776 - RNA, 243 nt, synthetic construct; identical to SEQ ID NO: 20179
  modified_base 1..243: mod_base = OTHER; note = Each t is m1f
  source 1..243: mol_type = other RNA

SEQ ID NO: 21777 - RNA, 243 nt, synthetic construct; identical to SEQ ID NO: 20180
  modified_base 1..243: mod_base = OTHER; note = Each t is m1f
  source 1..243: mol_type = other RNA

SEQ ID NO: 21778 - RNA, 243 nt, synthetic construct; identical to SEQ ID NO: 20181
  modified_base 1..243: mod_base = OTHER; note = Each t is m1f
  source 1..243: mol_type = other RNA

SEQ ID NO: 21779 - RNA, 243 nt, synthetic construct; identical to SEQ ID NO: 20182
  modified_base 1..243: mod_base = OTHER; note = Each t is m1f
  source 1..243: mol_type = other RNA

SEQ ID NO: 21780 - RNA, 243 nt, synthetic construct; identical to SEQ ID NO: 20183
  modified_base 1..243: mod_base = OTHER; note = Each t is m1f
  source 1..243: mol_type = other RNA

SEQ ID NO: 21781 - RNA, 243 nt, synthetic construct; identical to SEQ ID NO: 20184
  modified_base 1..243: mod_base = OTHER; note = Each t is m1f
  source 1..243: mol_type = other RNA

SEQ ID NO: 21782 - RNA, 243 nt, synthetic construct; identical to SEQ ID NO: 20185
  modified_base 1..243: mod_base = OTHER; note = Each t is m1f
  source 1..243: mol_type = other RNA

SEQ ID NO: 21783 - RNA, 243 nt, synthetic construct; identical to SEQ ID NO: 20186
  modified_base 1..243: mod_base = OTHER; note = Each t is m1f
  source 1..243: mol_type = other RNA

SEQ ID NO: 21784 - RNA, 243 nt, synthetic construct; identical to SEQ ID NO: 20187
  modified_base 1..243: mod_base = OTHER; note = Each t is m1f
  source 1..243: mol_type = other RNA

SEQ ID NO: 21785 - RNA, 243 nt, synthetic construct; identical to SEQ ID NO: 20188
  modified_base 1..243: mod_base = OTHER; note = Each t is m1f
  source 1..243: mol_type = other RNA

SEQ ID NO: 21786 - RNA, 243 nt, synthetic construct; identical to SEQ ID NO: 20189
  modified_base 1..243: mod_base = OTHER; note = Each t is m1f
  source 1..243: mol_type = other RNA

SEQ ID NO: 21787 - RNA, 243 nt, synthetic construct; identical to SEQ ID NO: 20190
  modified_base 1..243: mod_base = OTHER; note = Each t is m1f
  source 1..243: mol_type = other RNA

SEQ ID NO: 21788 - RNA, 243 nt, synthetic construct; identical to SEQ ID NO: 20191
  modified_base 1..243: mod_base = OTHER; note = Each t is m1f
  source 1..243: mol_type = other RNA

SEQ ID NO: 21789 - RNA, 252 nt, synthetic construct; identical to SEQ ID NO: 20192
  modified_base 1..252: mod_base = OTHER; note = Each t is m1f
  source 1..252: mol_type = other RNA

SEQ ID NO: 21790 - RNA, 276 nt, synthetic construct; identical to SEQ ID NO: 20193
  modified_base 1..276: mod_base = OTHER; note = Each t is m1f
  source 1..276: mol_type = other RNA

SEQ ID NO: 21791 - RNA, 279 nt, synthetic construct; identical to SEQ ID NO: 20194
  modified_base 1..279: mod_base = OTHER; note = Each t is m1f
  source 1..279: mol_type = other RNA

SEQ ID NO: 21792 - RNA, 252 nt, synthetic construct; identical to SEQ ID NO: 20195
  modified_base 1..252: mod_base = OTHER; note = Each t is m1f
  source 1..252: mol_type = other RNA

SEQ ID NO: 21793 - RNA, 249 nt, synthetic construct; identical to SEQ ID NO: 20196
  modified_base 1..249: mod_base = OTHER; note = Each t is m1f
  source 1..249: mol_type = other RNA

SEQ ID NO: 21794 - RNA, 252 nt, synthetic construct; identical to SEQ ID NO: 20197
  modified_base 1..252: mod_base = OTHER; note = Each t is m1f
  source 1..252: mol_type = other RNA

SEQ ID NO: 21795 - RNA, 252 nt, synthetic construct; identical to SEQ ID NO: 20198
  modified_base 1..252: mod_base = OTHER; note = Each t is m1f
  source 1..252: mol_type = other RNA

SEQ ID NO: 21796 - RNA, 249 nt, synthetic construct; identical to SEQ ID NO: 20199
  modified_base 1..249: mod_base = OTHER; note = Each t is m1f
  source 1..249: mol_type = other RNA

SEQ ID NO: 21797 - RNA, 279 nt, synthetic construct; identical to SEQ ID NO: 20200
  modified_base 1..279: mod_base = OTHER; note = Each t is m1f
  source 1..279: mol_type = other RNA

SEQ ID NO: 21798 - RNA, 252 nt, synthetic construct; identical to SEQ ID NO: 20201
  modified_base 1..252: mod_base = OTHER; note = Each t is m1f
  source 1..252: mol_type = other RNA

SEQ ID NO: 21799 - RNA, 252 nt, synthetic construct; identical to SEQ ID NO: 20202
  modified_base 1..252: mod_base = OTHER; note = Each t is m1f
  source 1..252: mol_type = other RNA

SEQ ID NO: 21800 - RNA, 252 nt, synthetic construct; identical to SEQ ID NO: 20203
  modified_base 1..252: mod_base = OTHER; note = Each t is m1f
  source 1..252: mol_type = other RNA

SEQ ID NO: 21801 - RNA, 246 nt, synthetic construct; identical to SEQ ID NO: 20204
  modified_base 1..246: mod_base = OTHER; note = Each t is m1f
  source 1..246: mol_type = other RNA

SEQ ID NO: 21802 - RNA, 276 nt, synthetic construct; identical to SEQ ID NO: 20205
  modified_base 1..276: mod_base = OTHER; note = Each t is m1f
  source 1..276: mol_type = other RNA

SEQ ID NO: 21803 - RNA, 261 nt, synthetic construct; identical to SEQ ID NO: 20206
  modified_base 1..261: mod_base = OTHER; note = Each t is m1f
  source 1..261: mol_type = other RNA

SEQ ID NO: 21804 - RNA, 261 nt, synthetic construct; identical to SEQ ID NO: 20207
  modified_base 1..261: mod_base = OTHER; note = Each t is m1f
  source 1..261: mol_type = other RNA

SEQ ID NO: 21805 - RNA, 267 nt, synthetic construct; identical to SEQ ID NO: 20208
  modified_base 1..267: mod_base = OTHER; note = Each t is m1f
  source 1..267: mol_type = other RNA

SEQ ID NO: 21806 - RNA, 342 nt, synthetic construct; identical to SEQ ID NO: 20209
  modified_base 1..342: mod_base = OTHER; note = Each t is m1f
  source 1..342: mol_type = other RNA

SEQ ID NO: 21807 - RNA, 252 nt, synthetic construct; identical to SEQ ID NO: 20210
  modified_base 1..252: mod_base = OTHER; note = Each t is m1f
  source 1..252: mol_type = other RNA

SEQ ID NO: 21808 - RNA, 249 nt, synthetic construct; identical to SEQ ID NO: 20211
  modified_base 1..249: mod_base = OTHER; note = Each t is m1f
  source 1..249: mol_type = other RNA

SEQ ID NO: 21809 - RNA, 261 nt, synthetic construct; identical to SEQ ID NO: 20212
  modified_base 1..261: mod_base = OTHER; note = Each t is m1f
  source 1..261: mol_type = other RNA

SEQ ID NO: 21810 - RNA, 252 nt, synthetic construct; identical to SEQ ID NO: 20213
  modified_base 1..252: mod_base = OTHER; note = Each t is m1f
  source 1..252: mol_type = other RNA

SEQ ID NO: 21811 - RNA, 273 nt, synthetic construct; identical to SEQ ID NO: 20214
  modified_base 1..273: mod_base = OTHER; note = Each t is m1f
  source 1..273: mol_type = other RNA

SEQ ID NO: 21812 - RNA, 276 nt, synthetic construct; identical to SEQ ID NO: 20215
  modified_base 1..276: mod_base = OTHER; note = Each t is m1f
  source 1..276: mol_type = other RNA

SEQ ID NO: 21813 - RNA, 279 nt, synthetic construct; identical to SEQ ID NO: 20216
  modified_base 1..279: mod_base = OTHER; note = Each t is m1f
  source 1..279: mol_type = other RNA

SEQ ID NO: 21814 - RNA, 291 nt, synthetic construct; identical to SEQ ID NO: 20217
  modified_base 1..291: mod_base = OTHER; note = Each t is m1f
  source 1..291: mol_type = other RNA

SEQ ID NO: 21815 - RNA, 240 nt, synthetic construct; identical to SEQ ID NO: 20218
  modified_base 1..240: mod_base = OTHER; note = Each t is m1f
  source 1..240: mol_type = other RNA

SEQ ID NO: 21816 - RNA, 240 nt, synthetic construct; identical to SEQ ID NO: 20219
  modified_base 1..240: mod_base = OTHER; note = Each t is m1f
  source 1..240: mol_type = other RNA

SEQ ID NO: 21817 - RNA, 240 nt, synthetic construct; identical to SEQ ID NO: 20220
  modified_base 1..240: mod_base = OTHER; note = Each t is m1f
  source 1..240: mol_type = other RNA

SEQ ID NO: 21818 - RNA, 240 nt, synthetic construct; identical to SEQ ID NO: 20221
  modified_base 1..240: mod_base = OTHER; note = Each t is m1f
  source 1..240: mol_type = other RNA

SEQ ID NO: 21819 - RNA, 240 nt, synthetic construct; identical to SEQ ID NO: 20222
  modified_base 1..240: mod_base = OTHER; note = Each t is m1f
  source 1..240: mol_type = other RNA

SEQ ID NO: 21820 - RNA, 240 nt, synthetic construct; identical to SEQ ID NO: 20223
  modified_base 1..240: mod_base = OTHER; note = Each t is m1f
  source 1..240: mol_type = other RNA

SEQ ID NO: 21821 - RNA, 240 nt, synthetic construct; identical to SEQ ID NO: 20224
  modified_base 1..240: mod_base = OTHER; note = Each t is m1f
  source 1..240: mol_type = other RNA

SEQ ID NO: 21822 - RNA, 240 nt, synthetic construct; identical to SEQ ID NO: 20225
  modified_base 1..240: mod_base = OTHER; note = Each t is m1f
  source 1..240: mol_type = other RNA

SEQ ID NO: 21823 - RNA, 240 nt, synthetic construct; identical to SEQ ID NO: 20226
  modified_base 1..240: mod_base = OTHER; note = Each t is m1f
  source 1..240: mol_type = other RNA

SEQ ID NO: 21824 - RNA, 240 nt, synthetic construct; identical to SEQ ID NO: 20227
  modified_base 1..240: mod_base = OTHER; note = Each t is m1f
  source 1..240: mol_type = other RNA

SEQ ID NO: 21825 - RNA, 240 nt, synthetic construct; identical to SEQ ID NO: 20228
  modified_base 1..240: mod_base = OTHER; note = Each t is m1f
  source 1..240: mol_type = other RNA

SEQ ID NO: 21826 - RNA, 240 nt, synthetic construct; identical to SEQ ID NO: 20229
  modified_base 1..240: mod_base = OTHER; note = Each t is m1f
  source 1..240: mol_type = other RNA

SEQ ID NO: 21827 - RNA, 240 nt, synthetic construct; identical to SEQ ID NO: 20230
  modified_base 1..240: mod_base = OTHER; note = Each t is m1f
  source 1..240: mol_type = other RNA

SEQ ID NO: 21828 - RNA, 240 nt, synthetic construct; identical to SEQ ID NO: 20231
  modified_base 1..240: mod_base = OTHER; note = Each t is m1f
  source 1..240: mol_type = other RNA

SEQ ID NO: 21829 - RNA, 240 nt, synthetic construct; identical to SEQ ID NO: 20232
  modified_base 1..240: mod_base = OTHER; note = Each t is m1f
  source 1..240: mol_type = other RNA

SEQ ID NO: 21830 - RNA, 240 nt, synthetic construct; identical to SEQ ID NO: 20233
  modified_base 1..240: mod_base = OTHER; note = Each t is m1f
  source 1..240: mol_type = other RNA

SEQ ID NO: 21831 - RNA, 38 nt, synthetic construct
  source 1..38: mol_type = other RNA
aaataagagagaaaagaagagtaagaagaaatataaga

SEQ ID NO: 21832 - RNA, 12 nt, synthetic construct
  source 1..12: mol_type = other RNA
gccaccatggcc

SEQ ID NO: 21833 - RNA, 21 nt, synthetic construct
  source 1..21: mol_type = other RNA
cctaagaagaagcgtaaagtg

SEQ ID NO: 21834 - RNA, 33 nt, synthetic construct
  source 1..33: mol_type = other RNA
agccgggtgaacggcagcggcagcggcggcggc

SEQ ID NO: 21835 - skipped

SEQ ID NO: 21836 - RNA, 21 nt, synthetic construct
  source 1..21: mol_type = other RNA
cccaagaaaaagagaaaagtc

SEQ ID NO: 21837 - skipped

SEQ ID NO: 21838 - RNA, 405 nt, synthetic construct
  source 1..405: mol_type = other RNA
gaacgcctcgtctacgaggtgcggcagaagtgcagaaacatcgaggacatctgcatctcctgcggatctctgaacgtgaccctggagcacccactgttcatcggcggcatgtgccagaactgtaaaaactgttttctggagtgtgcctatcaatacgacgatgacggctaccagagctactgcaccatctgttgcggcggaagagaggtgctgatgtgtggaaataacaactgctgccggtgcttctgcgtggaatgcgtggacctgctggtgggccccggcgccgcccaggccgctattaaggaagatccttggaactgctacatgtgcggccacaagggcacatacggcctgctgagacggagagaggactggcctagcagactgcagatgttcttcgccaat

SEQ ID NO: 21839 - skipped

SEQ ID NO: 21840 - protein, 18 aa, synthetic construct
PKKKRKVSRVNGSGSGGG

SEQ ID NO: 21841 - protein, 9 aa, synthetic construct
TSPKKKRKV

SEQ ID NO: 21842 - RNA, 38 nt, synthetic construct; identical to SEQ ID NO: 21831
  modified_base 1..38: mod_base = OTHER; note = Each t is m1f
  source 1..38: mol_type = other RNA

SEQ ID NO: 21843 - DNA, 38 bp, synthetic construct
  source 1..38: mol_type = other DNA
aaataagagagaaaagaagagtaagaagaaatataaga

SEQ ID NO: 21844 - RNA, 93 nt, synthetic construct; identical to SEQ ID NO: 1951
  source 1..93: mol_type = other RNA

SEQ ID NO: 21845 - RNA, 93 nt, synthetic construct; identical to SEQ ID NO: 1951
  modified_base 1..93: mod_base = OTHER; note = Each t is m1f
  source 1..93: mol_type = other RNA

SEQ ID NO: 21846 - RNA, 215 nt, synthetic construct
  source 1..215: mol_type = other RNA
tggatgctaagtcactaactgcctggtcccggacactggtgaccttcaaggatgtatttgtggacttcaccagggaggagtggaagctgctggacactgctcagcagatcgtgtacagaaatgtgatgctggagaactataagaacctggtttccttgggttatcagcttactaagccagatgtgatcctccggttggagaagggagaagagccc

SEQ ID NO: 21847 - DNA, 215 bp, synthetic construct
  source 1..215: mol_type = other DNA
tggatgctaagtcactaactgcctggtcccggacactggtgaccttcaaggatgtatttgtggacttcaccagggaggagtggaagctgctggacactgctcagcagatcgtgtacagaaatgtgatgctggagaactataagaacctggtttccttgggttatcagcttactaagccagatgtgatcctccggttggagaagggagaagagccc

SEQ ID NO: 21848 - RNA, 10 nt, synthetic construct
  source 1..10: mol_type = other RNA
gccaccatgg

SEQ ID NO: 21849 - RNA, 27 nt, synthetic construct
  source 1..27: mol_type = other RNA
cccgccgccaagagagtgaagctggat

SEQ ID NO: 21850 - DNA, 27 bp, synthetic construct
  source 1..27: mol_type = other DNA
cccgccgccaagagagtgaagctggat

SEQ ID NO: 21851 - RNA, 123 nt, synthetic construct
  source 1..123: mol_type = other RNA
aaaaaaaaaaaaaaaaaaaaaaaaaaaaaaaaaaaaaaaaaaaaaaaaaaaaaaaaaaaagcatgcaaaaaaaaaaaaaaaaaaaaaaaaaaaaaaaaaaaaaaaaaaaaaaaaaaaaaaaaa

SEQ ID NO: 21852 - DNA, 99 bp, synthetic construct
  source 1..99: mol_type = other DNA
gctgccttctgcggggcttgccttctggccatgcccttcttctctcccttgcacctgtacctcttggtctttgaataaagcctgagtaggaaggctagc

SEQ ID NO: 21853 - DNA, 93 bp, synthetic construct; identical to SEQ ID NO: 1936
  source 1..93: mol_type = other DNA

SEQ ID NO: 21854 - RNA, 99 nt, synthetic construct
  modified_base 1..99: mod_base = OTHER; note = Each t is m1f
  source 1..99: mol_type = other RNA
gctgccttctgcggggcttgccttctggccatgcccttcttctctcccttgcacctgtacctcttggtctttgaataaagcctgagtaggaaggctagc

SEQ ID NO: 21855 - RNA, 93 nt, synthetic construct; identical to SEQ ID NO: 1951
  modified_base 1..93: mod_base = OTHER; note = Each t is m1f
  source 1..93: mol_type = other RNA

SEQ ID NO: 21856 - RNA, 215 nt, synthetic construct; identical to SEQ ID NO: 21846
  modified_base 1..215: mod_base = OTHER; note = Each t is m1f
  source 1..215: mol_type = other RNA

SEQ ID NO: 21857 - RNA, 240 nt, synthetic construct
  source 1..240: mol_type = other RNA
ggagggccgagctctggcgcacccccaccaagtggaggctctcctgccgggtccccaacatctactgaagaaggcaccagcgaatccgcaacgcccgagtcaggccctggtacctccacagaaccatctgaaggtagtgcgcctggttccccagctggaagccctacttccaccgaagaaggcacgtcaaccgaaccaagtgaaggatctgcccctgggaccagcactgaaccatctgag

SEQ ID NO: 21858 - RNA, 63 nt, synthetic construct
  source 1..63: mol_type = other RNA
gcctctcctgccgcccctgcccctgccagccccgccgctccagcccccagcgcccctgctgcc

SEQ ID NO: 21859 - RNA, 84 nt, synthetic construct
  source 1..84: mol_type = other RNA
ggaagcggcggatctggcggcagcggcggctcccctgtgcccagcaccccacctacccctagccctagcacaccccccacccct

SEQ ID NO: 21860 - RNA, 75 nt, synthetic construct
  source 1..75: mol_type = other RNA
ccccccacacctagcccttctccagtgcccagcacccctcctacaaacagcagctccacccctccaacccctagc

SEQ ID NO: 21861 - RNA, 63 nt, synthetic construct
  source 1..63: mol_type = other RNA
gccagcgccgccgctcccgccgccgcctccgccgctgcctctgcccctagcgccgccgctgcc

SEQ ID NO: 21862 - RNA, 48 nt, synthetic construct
  source 1..48: mol_type = other RNA
gccgccagccccgccgcccctagcgcccctcctgccgctgcttctcca

SEQ ID NO: 21863 - RNA, 81 nt, synthetic construct; identical to SEQ ID NO: 1944
  source 1..81: mol_type = other RNA

SEQ ID NO: 21864 - RNA, 18 nt, synthetic construct
  source 1..18: mol_type = other RNA
ggcggttccggcggaggt

SEQ ID NO: 21865 - RNA, 18 nt, synthetic construct
  source 1..18: mol_type = other RNA
atcagagcccacggcgac

SEQ ID NO: 21866 - RNA, 27 nt, synthetic construct
  source 1..27: mol_type = other RNA
gccttccccgccgcccctgctcctgcc

SEQ ID NO: 21867 - RNA, 33 nt, synthetic construct
  source 1..33: mol_type = other RNA
ggctccggcaacagcagcggcagcggcggatct

SEQ ID NO: 21868 - RNA, 27 nt, synthetic construct
  source 1..27: mol_type = other RNA
gccagcgccgccgctcccgccgccgcc

SEQ ID NO: 21869 - RNA, 12 nt, synthetic construct
  source 1..12: mol_type = other RNA
cctcccacccct

SEQ ID NO: 21870 - RNA, 21 nt, synthetic construct
  source 1..21: mol_type = other RNA
gggggaagtggtggaggatct

SEQ ID NO: 21871 - RNA, 12 nt, synthetic construct
  source 1..12: mol_type = other RNA
ggctccggctcc

SEQ ID NO: 21872 - RNA, 21 nt, synthetic construct
  source 1..21: mol_type = other RNA
ggctccggctccggctccggc

SEQ ID NO: 21873 - RNA, 27 nt, synthetic construct
  source 1..27: mol_type = other RNA
cggtctggcggatctggcggaggctcc

SEQ ID NO: 21874 - protein, 9 aa, synthetic construct
RSGGSGGGS

SEQ ID NO: 21875 - RNA, 21 nt, synthetic construct
  modified_base 1..21: mod_base = OTHER; note = Each t is m1f
  source 1..21: mol_type = other RNA
cctaagaagaagcgtaaagtg

SEQ ID NO: 21876 - RNA, 5546 nt, synthetic construct
  source 1..5546: mol_type = other RNA
aggaaataagagagaaaagaagagtaagaagaaatataagagccaccatggcccctaagaagaagcgtaaagtgagccgggtgaacggcagcggcagcggcggcggcatgaaccacgaccaggagttcgacccccctaaggtgtaccctcccgtccccgccgagaagagaaagcccatccgggtcctgagcctgttcgatggcatcgccaccggtctgctggtgctgaaggacctgggcatccaggtggataggtacattgcctccgaggtgtgcgaggactccatcaccgtgggaatggtgcgtcatcagggcaagatcatgtacgtgggcgacgtgcggagcgtgacacagaagcatatccaggagtggggccctttcgacctggtgatcggcggcagcccttgcaatgacctgagcatcgtgaacccagcccggaagggcctgtacgagggaaccggcagactgttcttcgagttttacagactgctgcacgacgcccggcctaaggaaggcgacgaccggcccttcttttggctgttcgagaatgtggtggccatgggagtcagcgacaagcgggatattagccggttcctggagagcaaccccgtgatgatcgatgccaaggaagtgagcgccgcccaccgggccagatacttctggggcaatctgcctggcatgaacagacccctggccagcaccgtgaacgacaagctggagctgcaggagtgcctggagcacggccggatcgccaagttcagcaaggtgagaaccatcaccacccgaagcaacagcatcaaacaaggcaaggaccagcactttcctgtgttcatgaacgagaaggaggacatcctgtggtgtaccgagatggagagagtgttcgggttcccagtccactacacagatgtcagcaacatgtctagactggccagacagagactgctgggaagaagctggtccgtccctgtgatcagacacctgttcgcccctctgaaggagtacttcgcctgcgtgagcagcggcaacagcaacgccaacagccggggccccagcttctctagcggcctggtgccactgtccctgagagggagccacatgggccccatggagatctacaaaaccgtgagcgcctggaagcggcagcctgtgcgcgtgctgagcctgtttcggaatatcgataaagtcctgaaaagcctgggattcctggagagcggctctggctccggcggtggcaccctgaagtacgtggaggatgtgacaaacgtggtcagacgggatgtggagaagtggggccccttcgatctggtgtacggcagcacccaacccctgggcagctcttgtgaccggtgccctggctggtacatgtttcagttccaccggatcctgcagtacgccctgccgagacaggagtcccagcggccattcttttggattttcatggacaacttgctgctgaccgaggatgaccaggaaactaccactcggttcctgcagaccgaagccgtgaccctgcaggacgtgagaggccgggactaccagaacgccatgcgggtgtggtccaacatccctggactgaaaagcaagcacgcacctctgacccctaaagaagaggagtacctgcaggcccaggtgcggagcagaagcaagctggacgcccctaaggtggatctgctggtgaagaattgcctcctgcccctgagagagtacttcaagtatttcagccagaatagtctgcccctgggcggcccaagcagcggcgcccctcctcccagcggcggcagcccagccggctccccaacctctaccgaggagggcacctctgagtccgccacccccgagagcggccctggcacctccaccgagcccagcgagggcagcgcacccggcagccctgccggcagccccacctccacagaggagggaaccagcaccgagcccagcgaaggcagcgccccaggcaccagcaccgagcctagtgagggcggctctggcggcggcagcgcccaggagattaaacggatcaacaagatcagaagaagacttgtgaaagacagcaacaccaagaaggccggcaagacaggccccatgaaaaccctgctggttagagtgatgacacccgatctgagagagcggctggaaaacctgagaaagaagcctgaaaatatcccccagcccatcagcaatacatctagagccaacctgaataagctgctgaccgattacaccgaaatgaagaaggcgatcctgcatgtgtactgggaagagttccagaaggaccctgtgggcctgatgagccgggtggcccagcctgccagcaagaagatcgatcagaacaagctgaaacctgagatggacgagaagggcaacctgaccaccgccggctttgcctgctctcagtgtggccagcccctgttcgtgtacaagctggagcaggtgtctgagaagggcaaggcttacaccaactacttcggacggtgcaatgtggccgagcacgaaaagctgatcctgctggcccagctgaagcccgagaaggatagcgacgaagccgtgacatatagcctgggaaagtttgggcagagggccctggatttctacagcattcatgtgaccaaggagtccacccaccccgtgaagcccctggcccagatcgccggaaacagatacgcctccggacctgtgggaaaggccctgagcgacgcatgtatgggcacaatcgcctccttcctgtctaagtaccaggacatcatcatcgaacaccagaaggtggtgaagggcaaccagaagagactggagagcctgcgggagctggccggcaaggaaaacctggaataccctagcgtgaccctgccacctcagcctcacaccaaggagggcgttgatgcctacaacgaagtgatcgcccgggtgcgaatgtgggtgaacctgaacctgtggcagaagctgaagctaagcagagatgatgccaagcctctgctgagactgaagggattcccttcctttcctctggtcgagagacaggccaacgaagtggactggtgggacatggtgtgtaacgtgaagaagctgatcaacgagaaaaaggaggatggcaaggtgttttggcagaatctggctggctacaagagacaggaagccctgagaccatacctgagcagcgaggaagatcggaagaagggaaagaaattcgctcggtaccagctgggcgacctgctgctgcacctggaaaagaagcacggcgaggactggggaaaggtgtacgacgaggcctgggagcggattgacaagaaagtggaaggcctgagcaagcacatcaagctggaagaggaacggagaagcgaggacgcccagagcaaggccgccctgaccgactggctgcgggctaaggccagcttcgtgatcgagggcctgaaggaggccgacaaggacgagttctgcagatgcgagctgaagctgcagaagtggtacggggacctgcggggaaagcccttcgccatcgaagccgagaacagcatcctggacatcagcggcttcagcaagcagtacaactgtgccttcatctggcagaaggacggcgtgaagaagctgaacctgtacctgatcatcaactacttcaagggcggcaagctgcggttcaagaagatcaaacctgaagccttcgaagccaacagattctacaccgtgatcaacaaaaagagcggcgagatcgtgcccatggaggtgaacttcaacttcgacgaccccaacctgatcatcctgcctctggcctttggcaagagacagggcagagaattcatctggaacgacctgctgtccctggaaaccggcagcctgaagctggccaacggaagagtgatcgagaagacactgtacaacagaagaacccggcaggatgagcctgccctgttcgtggccctgaccttcgagcggcgggaggtcctggactcctccaatatcaaaccaatgaacctgatcggcgtggcaagaggcgaaaacatccccgccgtgatcgccctgaccgaccccgagggctgcccactgagccggtttaaggatagcctgggaaacccaacccacatcctgagaatcggcgagagctataaggagaagcagcggaccatccaggccaagaaggaggtggagcagcggagagccggcggctacagccggaagtacgccagcaaagccaagaatctggcagacgatatggtgagaaacaccgctagagatctgctgtactacgccgtgacccaggatgccatgctgatcttcgccaacctgagccggggcttcggccggcagggcaagcggaccttcatggccgagagacagtacacacggatggaggactggctgaccgccaagctggcctacgagggcctgagcaagacctacctgtccaagacactggcccagtacacctccaagacatgcagcaactgtgggtttaccatcaccagcgccgactacgacagggtgctggagaagctgaagaagacagcaacaggctggatgaccacaattaacggcaaggagctgaaggtggagggccagattacctactacaacagatacaagagacagaacgtagtcaaggacctgtccgtcgagctggatagactgagcgaagaatctgtgaacaacgacatctcctcctggacaaagggcagaagcggagaagctctgagcctcctgaagaaaagattctcccatagacccgtgcaggagaagttcgtgtgcctgaactgcggcttcgagacacacgcagccgagcaagccgccctgaacatcgccagatcctggctgttcctgcggagccaggagtacaagaaataccagacaaacaagacaaccggcaacaccgataagagagccttcgtcgagacctggcagtccttttaccggaagaagcttaaggaggtgtggaaacctgccgtgcggtctggcggatctggcggaggctccacaagcatgaacaactcccagggcagagtgaccttcgaggacgtgaccgtgaattttacacagggagagtggcagagactgaaccccgagcagagaaacctgtaccgggatgtgatgctggaaaactacagcaatctggtgtccgtgggccagggcgagaccacaaagcctgacgtgatcctgcgtctggagcagggcaaggaaccctggctggaggaggaggaggtgctgggaagcggacgggccgagaagaacggcgacatcggcggacagatctggaagcctaaggacgtgaaagaaagcctgaccagccccaagaaaaagagaaaagtcgactacaaggatgacgatgacaaggactacaaggatgacgacgacaagtaatagataagcggccgcttaattaagctgccttctgcggggcttgccttctggccatgcccttcttctctcccttgcacctgtacctcttggtctttgaataaagcctgagtaggaagtctagaaaaaaaaaaaaaaaaaaaaaaaaaaaaaaaaaaaaaaaaaaaaaaaaaaaaaaaaaaaaaaaaaaaaaaaaaaaaaaaa

SEQ ID NO: 21877 - RNA, 109 nt, synthetic construct
  source 1..109: mol_type = other RNA
actggcgcttctatctgattactctgagcgccatcaccagcgactatgtcgtagtgggtaaagctccctcttcggagggagcatcagagcccctcttaatccccactcc

SEQ ID NO: 21878 - RNA, 903 nt, synthetic construct; identical to SEQ ID NO: 1955
  modified_base 1..903: mod_base = OTHER; note = Each t is m1f
  source 1..903: mol_type = other RNA

SEQ ID NO: 21879 - RNA, 645 nt, synthetic construct; identical to SEQ ID NO: 1945
  modified_base 1..645: mod_base = OTHER; note = Each t is m1f
  source 1..645: mol_type = other RNA

SEQ ID NO: 21880 - RNA, 3233 nt, synthetic construct
  source 1..3233: mol_type = other RNA
aggaaataagagagaaaagaagagtaagaagaaatataagagccaccatggcccctgctgccaagagagtgaagctggatagcagacaggagatcaagcggattaataaaattcggagaagactggtgaaggattctaacacaaagaaggctggcaagacaggccctatgaagacactgctggtgagagtgatgacacccgacctgagagaaagactggaaaacctgagaaagaagcctgagaatatcccccagcccatcagcaacacaagccgggccaacctgaataagctgctgaccgactacaccgaaatgaagaaggccatcctgcacgtgtattgggaagagttccagaaagacccagtcggcctgatgagcagagtggctcagcctgccagcaagaagatcgatcagaacaagctgaagcccgaaatggacgagaaggggaacctgacaaccgccggctttgcctgtagccagtgcggccagcccctgtttgtgtacaaactggaacaggtgagcgaaaagggcaaggcttacacgaattacttcggcagatgcaacgtggccgagcacgagaagctgatcctgctggcccagctgaagcctgagaaggatagcgatgaggcagtgacatattccctgggcaagttcggacagcgggccctggatttttattccattcatgtgaccaaggaatccacccaccccgtcaagcctcttgcccaaattgccggcaacagatacgccagcggccccgtgggcaaggccctgagcgacgcctgtatgggcaccatcgccagcttcctgtctaagtaccaggacattatcatcgagcaccagaaggtggtgaagggcaaccagaagagactggagagcctgcgcgagctggccggcaaggaaaacctggagtatcctagcgtgaccctgcctcctcagcctcatacaaaggagggcgtggatgcctacaacgaagtgatcgcccgggtgcggatgtgggtgaacctgaatctgtggcagaagctgaagctgtctagagacgacgccaagcccctgctgagactgaagggcttccccagcttccctctggtggagagacaggcaaatgaagtggactggtgggacatggtgtgtaacgtgaagaagctgatcaatgagaagaaggaggacggcaaagtgttctggcagaatctggccggctacaagcgtcaggaggccctgcggccctacctgagcagcgaggaagacagaaagaagggcaagaagttcgcccggtatcagctgggggacctgctgctgcacctcgagaagaagcacggcgaagactgggggaaggtgtacgatgaggcctgggagcggatcgataagaaggtggagggcctgagcaagcacatcaagctggaggaggaacggagatctgaggacgcccagagcaaggccgccctgaccgactggctgagagccaaggccagcttcgtcatcgaggggctgaaggaggccgacaaggacgagttctgccggtgcgaactgaagctgcagaagtggtacggagatctgagaggcaaacctttcgccatcgaggccgagaacagcatcctggacatcagcggcttcagcaagcagtacaactgcgcctttatttggcagaaggacggagtgaagaagctgaacctgtacctgatcatcaactatttcaagggcggcaagctgagattcaagaagatcaagcctgaagccttcgaggccaacagattctacaccgtgattaacaagaaaagcggagagatcgtgccaatggaagtgaacttcaacttcgacgaccctaacctgatcatcctgcccctggcatttggcaagcggcagggcagagagttcatctggaacgacctgctgtctctggagaccggcagcctgaagctggccaacggcagagtgatcgagaagacactgtacaacagacgaaccagacaagacgagcccgccctgtttgtggccctgaccttcgagagaagagaggtgctggacagcagcaatatcaagcctatgaacctgatcggcgtggaccggggcgagaacatccctgccgtgatcgcccttaccgaccccgagggatgccctctgagccggtttaaagacagcctgggcaaccctacccacatcctgagaattggcgagtcctacaaggagaagcagagaaccatccaggccaagaaggaggtggagcagcggcgggctggcggctactcccggaagtacgccagcaaggccaagaacctggccgacgacatggttagaaataccgccagagacctcctgtactacgctgtgacccaggacgccatgctgatcttcgagaacctgagcagaggcttcggcagacagggcaagagaaccttcatggccgagagacagtacacccggatggaggactggctgaccgccaagctggcctacgagggcctgccctctaagacctacctgtccaagaccttggcacagtacaccagcaagacatgctctaactgcggcttcacaatcacgagcgccgactacgaccgggtgctggagaaactgaagaagaccgccacaggctggatgaccaccattaacggcaaggagctgaaggtggagggccagatcacctactacaacaggtacaaacggcagaacgtggtgaaggacctgagcgtggaactggatagactgagcgaggaaagcgtaaacaatgacatcagcagctggaccaagggccggagcggcgaggccctgagcctgctgaagaagagattctcccacagaccagtgcaggagaagttcgtgtgtctgaactgcggcttcgagacccacgccgacgagcaagccgccctgaacatcgcccggtcttggcttttcctgcggagccaggagtacaagaagtaccagacaaacaagaccacaggcaacacagacaagagagccttcgtcgagacctggcagagcttctacagaaagaagctgaaggaggtgtggaagcctgccgtgggaagccccgctgccaagagagtgaagctggactaagctgccttctgcggggcttgccttctggccatgcccttcttctctcccttgcacctgtacctcttggtctttgaataaagcctgagtaggaagtctagaaaaaaaaaaaaaaaaaaaaaaaaaaaaaaaaaaaaaaaaaaaaaaaaaaaaaaaaaaaaaaaaaaaaaaaaaaaaaaa

SEQ ID NO: 21881 - RNA, 5848 nt, synthetic construct
  source 1..5848: mol_type = other RNA
aggaaataagagagaaaagaagagtaagaagaaatataagagccaccatggcccctaagaagaagcgtaaagtgagccggatggaacgcctcgtctacgaggtgcggcagaagtgcagaaacatcgaggacatctgcatctcctgcggatctctgaacgtgaccctggagcacccactgttcatcggcggcatgtgccagaactgtaaaaactgttttctggagtgtgcctatcaatacgacgatgacggctaccagagctactgcaccatctgttgcggcggaagagaggtgctgatgtgtggaaataacaactgctgccggtgcttctgcgtggaatgcgtggacctgctggtgggccccggcgccgcccaggccgctattaaggaagatccttggaactgctacatgtgcggccacaagggcacatacggcctgctgagacggagagaggactggcctagcagactgcagatgttcttcgccaataaccacgaccaggagttcgacccccctaaggtgtaccctcccgtccccgccgagaagagaaagcccatccgggtcctgagcctgttcgatggcatcgccaccggtctgctggtgctgaaggacctgggcatccaggtggataggtacattgcctccgaggtgtgcgaggactccatcaccgtgggaatggtgcgtcatcagggcaagatcatgtacgtgggcgacgtgcggagcgtgacacagaagcatatccaggagtggggccctttcgacctggtgatcggcggcagcccttgcaatgacctgagcatcgtgaacccagcccggaagggcctgtacgagggaaccggcagactgttcttcgagttttacagactgctgcacgacgcccggcctaaggaaggcgacgaccggcccttcttttggctgttcgagaatgtggtggccatgggagtcagcgacaagcgggatattagccggttcctggagagcaaccccgtgatgatcgatgccaaggaagtgagcgccgcccaccgggccagatacttctggggcaatctgcctggcatgaacagacccctggccagcaccgtgaacgacaagctggagctgcaggagtgcctggagcacggccggatcgccaagttcagcaaggtgagaaccatcaccacccgaagcaacagcatcaaacaaggcaaggaccagcactttcctgtgttcatgaacgagaaggaggacatcctgtggtgtaccgagatggagagagtgttcgggttcccagtccactacacagatgtcagcaacatgtctagactggccagacagagactgctgggaagaagctggtccgtccctgtgatcagacacctgttcgcccctctgaaggagtacttcgcctgcgtgagcagcggcaacagcaacgccaacagccggggccccagcttctctagcggcctggtgccactgtccctgagagggagccacatgggccccatggagatctacaaaaccgtgagcgcctggaagcggcagcctgtgcgcgtgctgagcctgtttcggaatatcgataaagtcctgaaaagcctgggattcctggagagcggctctggctccggcggtggcaccctgaagtacgtggaggatgtgacaaacgtggtcagacgggatgtggagaagtggggccccttcgatctggtgtacggcagcacccaacccctgggcagctcttgtgaccggtgccctggctggtacatgtttcagttccaccggatcctgcagtacgccctgccgagacaggagtcccagcggccattcttttggattttcatggacaacttgctgctgaccgaggatgaccaggaaactaccactcggttcctgcagaccgaagccgtgaccctgcaggacgtgagaggccgggactaccagaacgccatgcgggtgtggtccaacatccctggactgaaaagcaagcacgcacctctgacccctaaagaagaggagtacctgcaggcccaggtgcggagcagaagcaagctggacgcccctaaggtggatctgctggtgaagaattgcctcctgcccctgagagagtacttcaagtatttcagccagaatagtctgcccctgggaggcagcggcggcggcatgaacaactcccagggcagagtgaccttcgaggacgtgaccgtgaattttacacagggagagtggcagagactgaaccccgagcagagaaacctgtaccgggatgtgatgctggaaaactacagcaatctggtgtccgtgggccagggcgagaccacaaagcctgacgtgatcctgcgtctggagcagggcaaggaaccctggctggaggaggaggaggtgctgggaagcggacgggccgagaagaacggcgacatcggcggacagatctggaagcctaaggacgtgaaagaaagcctgggcggcccaagcagcggcgcccctcctcccagcggcggcagcccagccggctccccaacctctaccgaggagggcacctctgagtccgccacccccgagagcggccctggcacctccaccgagcccagcgagggcagcgcacccggcagccctgccggcagccccacctccacagaggagggaaccagcaccgagcccagcgaaggcagcgccccaggcaccagcaccgagcctagtgagcaggagattaaacggatcaacaagatcagaagaagacttgtgaaagacagcaacaccaagaaggccggcaagacaggccccatgaaaaccctgctggttagagtgatgacacccgatctgagagagcggctggaaaacctgagaaagaagcctgaaaatatcccccagcccatcagcaatacatctagagccaacctgaataagctgctgaccgattacaccgaaatgaagaaggcgatcctgcatgtgtactgggaagagttccagaaggaccctgtgggcctgatgagccgggtggcccagcctgccagcaagaagatcgatcagaacaagctgaaacctgagatggacgagaagggcaacctgaccaccgccggctttgcctgctctcagtgtggccagcccctgttcgtgtacaagctggagcaggtgtctgagaagggcaaggcttacaccaactacttcggacggtgcaatgtggccgagcacgaaaagctgatcctgctggcccagctgaagcccgagaaggatagcgacgaagccgtgacatatagcctgggaaagtttgggcagagggccctggatttctacagcattcatgtgaccaaggagtccacccaccccgtgaagcccctggcccagatcgccggaaacagatacgcctccggacctgtgggaaaggccctgagcgacgcatgtatgggcacaatcgcctccttcctgtctaagtaccaggacatcatcatcgaacaccagaaggtggtgaagggcaaccagaagagactggagagcctgcgggagctggccggcaaggaaaacctggaataccctagcgtgaccctgccacctcagcctcacaccaaggagggcgttgatgcctacaacgaagtgatcgcccgggtgcgaatgtgggtgaacctgaacctgtggcagaagctgaagctaagcagagatgatgccaagcctctgctgagactgaagggattcccttcctttcctctggtcgagagacaggccaacgaagtggactggtgggacatggtgtgtaacgtgaagaagctgatcaacgagaaaaaggaggatggcaaggtgttttggcagaatctggctggctacaagagacaggaagccctgagaccatacctgagcagcgaggaagatcggaagaagggaaagaaattcgctcggtaccagctgggcgacctgctgctgcacctggaaaagaagcacggcgaggactggggaaaggtgtacgacgaggcctgggagcggattgacaagaaagtggaaggcctgagcaagcacatcaagctggaagaggaacggagaagcgaggacgcccagagcaaggccgccctgaccgactggctgcgggctaaggccagcttcgtgatcgagggcctgaaggaggccgacaaggacgagttctgcagatgcgagctgaagctgcagaagtggtacggggacctgcggggaaagcccttcgccatcgaagccgagaacagcatcctggacatcagcggcttcagcaagcagtacaactgtgccttcatctggcagaaggacggcgtgaagaagctgaacctgtacctgatcatcaactacttcaagggcggcaagctgcggttcaagaagatcaaacctgaagccttcgaagccaacagattctacaccgtgatcaacaaaaagagcggcgagatcgtgcccatggaggtgaacttcaacttcgacgaccccaacctgatcatcctgcctctggcctttggcaagagacagggcagagaattcatctggaacgacctgctgtccctggaaaccggcagcctgaagctggccaacggaagagtgatcgagaagacactgtacaacagaagaacccggcaggatgagcctgccctgttcgtggccctgaccttcgagcggcgggaggtcctggactcctccaatatcaaaccaatgaacctgatcggcgtggcaagaggcgaaaacatccccgccgtgatcgccctgaccgaccccgagggctgcccactgagccggtttaaggatagcctgggaaacccaacccacatcctgagaatcggcgagagctataaggagaagcagcggaccatccaggccaagaaggaggtggagcagcggagagccggcggctacagccggaagtacgccagcaaagccaagaatctggcagacgatatggtgagaaacaccgctagagatctgctgtactacgccgtgacccaggatgccatgctgatcttcgccaacctgagccggggcttcggccggcagggcaagcggaccttcatggccgagagacagtacacacggatggaggactggctgaccgccaagctggcctacgagggcctgagcaagacctacctgtccaagacactggcccagtacacctccaagacatgcagcaactgtgggtttaccatcaccagcgccgactacgacagggtgctggagaagctgaagaagacagcaacaggctggatgaccacaattaacggcaaggagctgaaggtggagggccagattacctactacaacagatacaagagacagaacgtagtcaaggacctgtccgtcgagctggatagactgagcgaagaatctgtgaacaacgacatctcctcctggacaaagggcagaagcggagaagctctgagcctcctgaagaaaagattctcccatagacccgtgcaggagaagttcgtgtgcctgaactgcggcttcgagacacacgcagccgagcaagccgccctgaacatcgccagatcctggctgttcctgcggagccaggagtacaagaaataccagacaaacaagacaaccggcaacaccgataagagagccttcgtcgagacctggcagtccttttaccggaagaagcttaaggaggtgtggaaacctgccgtgcggtctggcggatctggcggaggctccaccagccccaagaaaaagagaaaagtctaatagataagctgccttctgcggggcttgccttctggccatgcccttcttctctcccttgcacctgtacctcttggtctttgaataaagcctgagtaggaagtctagaaaaaaaaaaaaaaaaaaaaaaaaaaaaaaaaaaaaaaaaaaaaaaaaaaaaaaaaaaaaaaaaaaaaaaaaaaaaaaaa

SEQ ID NO: 21882 - RNA, 4991 nt, synthetic construct
  source 1..4991: mol_type = other RNA
aggaaataagagagaaaagaagagtaagaagaaatataagagccaccatgagcgaggtggagttcagccacgagtactggatgcggcacgccctgaccctggccaagcgggcccgggacgagcgggaggtgcccgtgggcgccgtgctggtgctgaacaaccgggtgatcggcgagggctggaaccgggccatcggcctgcacgaccccaccgcccacgccgagatcatggccctgcggcagggcggcctggtgatgcagaactaccggctgatcgacgccaccctgtacgtgaccttcgagccctgcgtgatgtgcgccggcgccatgatccacagccggatcggccgggtggtgttcggcgtgcggaacgccaagaccggcgccgccggcagcctgatggacgtgctgcaccaccccggcatgaaccaccgggtggagatcaccgagggcatcctggccgacgagtgcgccgccctgctgtgccggttcttccggatgccccggcgggtgttcaacgcccagaagaaggcccagagcagcaccgacagcggcggcagcagcggcggcagcagcggcagcgagacacccggcaccagcgagagcgccacccccgagagcagcggcggcagcagcggcggcagcgacaagaagtacagcatcggcctggccatcggcaccaacagcgtgggctgggccgtgatcaccgacgagtacaaggtgcccagcaagaagttcaaggtgctgggcaacaccgaccggcacagcatcaagaagaacctgatcggcgccctgctgttcgacagcggcgagacagccgaggccacccggctgaagcggaccgcccggcggcggtacacccggcggaagaaccggatctgctacctgcaggagatcttcagcaacgagatggccaaggtggacgacagcttcttccaccggctggaggagagcttcctggtggaggaggacaagaagcacgagcggcaccccatcttcggcaacatcgtggacgaggtggcctaccacgagaagtaccccaccatctaccacctgcggaagaagctggtggacagcaccgacaaggccgacctgcggctgatctacctggccctggcccacatgatcaagttccggggccacttcctgatcgagggcgacctgaaccccgacaacagcgacgtggacaagctgttcatccagctggtgcagacctacaaccagctgttcgaggagaaccccatcaacgccagcggcgtggacgccaaggccatcctgagcgcccggctgagcaagagccggcggctggagaacctgatcgcccagctgcccggcgagaagaagaacggcctgttcggcaacctgatcgccctgagcctgggcctgacccccaacttcaagagcaacttcgacctggccgaggacgccaagctgcagctgagcaaggacacctacgacgacgacctggacaacctgctggcccagatcggcgaccagtacgccgacctgttcctggccgccaagaacctgagcgacgccatcctgctgagcgacatcctgcgggtgaacaccgagatcaccaaggcccccctgagcgccagcatgatcaagcggtacgacgagcaccaccaggacctgaccctgctgaaggccctggtgcggcagcagctgcccgagaagtacaaggagatcttcttcgaccagagcaagaacggctacgccggctacatcgacggcggcgccagccaggaggagttctacaagttcatcaagcccatcctggagaagatggacggcaccgaggagctgctggtgaagctgaaccgggaggacctgctgcggaagcagcggaccttcgacaacggcagcatcccccaccagatccacctgggcgagctgcacgccatcctgcggcggcaggaggacttctaccccttcctgaaggacaaccgggagaagatcgagaagatcctgaccttccggatcccctactacgtgggccccctggcccggggcaacagccggttcgcctggatgacccgcaagagcgaggagacaatcaccccctggaacttcgaggaggtggtggacaagggcgccagcgcccagagcttcatcgagcggatgaccaacttcgacaagaacctgcccaacgagaaggtgctgcccaagcacagcctgctgtacgagtacttcaccgtgtacaacgagctgaccaaggtgaagtacgtgaccgagggcatgcggaagcccgccttcctgagcggcgagcagaagaaggccatcgtggacctgctgttcaagaccaaccggaaggtgaccgtgaagcagctgaaggaggactacttcaagaagatcgagtgcttcgacagcgtggagatcagcggcgtggaggaccggttcaacgccagcctgggcacctaccacgacctgctgaagatcatcaaggacaaggacttcctggacaacgaggagaacgaggacatcctggaggacatcgtgctgaccctgaccctgttcgaggaccgggagatgatcgaggagcggctgaagacctacgcccacctgttcgacgacaaggtgatgaagcagctgaagcggcggcggtacaccggctggggccggctgagccggaagctgatcaacggcatccgggacaagcagagcggcaagaccatcctggacttcctcaagagcgacggcttcgccaaccggaacttcatgcagctgatccacgacgacagcctgaccttcaaggaggacatccagaaggcccaggtgagcggccagggcgacagcctgcacgagcacatcgccaacctggccggcagccccgccatcaagaagggcatcctgcagaccgtgaaggtggtggacgagctggtgaaggtgatgggccggcacaagcccgagaacatcgtgatcgagatggcccgggagaaccagaccacccagaagggccagaagaacagccgggagcggatgaagcggatcgaggagggcatcaaggagctgggcagccagatcctgaaggagcaccccgtggagaacacccagctgcagaacgagaagctgtacctgtactacctgcagaacggccgggacatgtacgtggaccaggagctggacatcaaccggctgagcgactacgacgtggaccacatcgtgccccagagcttcctgaaggacgacagcatcgacaacaaggtgctgacccggagcgacaagaaccggggcaagagcgacaacgtgcccagcgaggaggtggtgaagaagatgaagaactactggcggcagctgctgaacgccaagctgatcacccagcggaagttcgacaacctgaccaaggccgagcggggcggcctgagcgagctggacaaggccggcttcatcaagcggcagctggtggagacacggcagatcaccaagcacgtggcccagatcctggacagccggatgaacaccaagtacgacgagaacgacaagctgatccgggaggtgaaggtgatcaccctcaagagcaagctggtgagcgacttccggaaggacttccagttctacaaggtgcgggagatcaacaactaccaccacgcccacgacgcctacctgaacgccgtggtgggcaccgccctgatcaagaagtaccccaagctggagagcgagttcgtgtacggcgactacaaggtgtacgacgtgcggaagatgatcgccaagagcgagcaggagatcggcaaggccaccgccaagtacttcttctacagcaacatcatgaacttcttcaagaccgagatcaccctggccaacggcgagatccggaagcggcccctgatcgagacaaacggcgagacaggcgagatcgtgtgggacaagggccgggacttcgccaccgtgcggaaggtgctgagcatgccccaggtgaacatcgtgaagaagaccgaggtgcagaccggcggcttcagcaaggagagcatcctgcccaagcggaacagcgacaagctgatcgcccggaagaaggactgggaccccaagaagtacggcggcttcgacagccccaccgtggcctacagcgtgctggtggtggccaaggtggagaagggcaagagcaagaagctcaagagcgtgaaggagctgctgggcatcaccatcatggagcggagcagcttcgagaagaaccccatcgacttcctggaggccaagggctacaaggaggtgaagaaggacctgatcatcaagctgcccaagtacagcctgttcgagctggagaacggccggaagcggatgctggccagcgccggcgagctgcagaagggcaacgagctggccctgcccagcaagtacgtgaacttcctgtacctggccagccactacgagaagctgaagggcagccccgaggacaacgagcagaagcagctgttcgtggagcagcacaagcactacctggacgagatcatcgagcagatcagcgagttcagcaagcgggtgatcctggccgacgccaacctggacaaggtgctgagcgcctacaacaagcaccgggacaagcccatccgggagcaggccgagaacatcatccacctgttcaccctgaccaacctgggcgcccccgccgccttcaagtacttcgacaccaccatcgaccggaagcggtacaccagcaccaaggaggtgctggacgccaccctgatccaccagagcatcaccggcctgtacgagacacggatcgacctgagccagctgggcggcgacgagggcgccgacaagcggaccgccgacggcagcgagttcgagagccccaagaagaagcggaaggtgtgagctgccttctgcggggcttgccttctggccatgcccttcttctctcccttgcacctgtacctcttggtctttgaataaagcctgagtaggaagtctagaaaaaaaaaaaaaaaaaaaaaaaaaaaaaaaaaaaaaaaaaaaaaaaaaaaaaaaaaaaaaaaaaaaaaaaaaaaaaaa

SEQ ID NO: 21883 - RNA, 6086 nt, synthetic construct
  source 1..6086: mol_type = other RNA
aggaaataagagagaaaagaagagtaagaagaaatataagagccaccatggcccctaagaagaagcgtaaagtgagccggatggaacgcctcgtctacgaggtgcggcagaagtgcagaaacatcgaggacatctgcatctcctgcggatctctgaacgtgaccctggagcacccactgttcatcggcggcatgtgccagaactgtaaaaactgttttctggagtgtgcctatcaatacgacgatgacggctaccagagctactgcaccatctgttgcggcggaagagaggtgctgatgtgtggaaataacaactgctgccggtgcttctgcgtggaatgcgtggacctgctggtgggccccggcgccgcccaggccgctattaaggaagatccttggaactgctacatgtgcggccacaagggcacatacggcctgctgagacggagagaggactggcctagcagactgcagatgttcttcgccaataaccacgaccaggagttcgacccccctaaggtgtaccctcccgtccccgccgagaagagaaagcccatccgggtcctgagcctgttcgatggcatcgccaccggtctgctggtgctgaaggacctgggcatccaggtggataggtacattgcctccgaggtgtgcgaggactccatcaccgtgggaatggtgcgtcatcagggcaagatcatgtacgtgggcgacgtgcggagcgtgacacagaagcatatccaggagtggggccctttcgacctggtgatcggcggcagcccttgcaatgacctgagcatcgtgaacccagcccggaagggcctgtacgagggaaccggcagactgttcttcgagttttacagactgctgcacgacgcccggcctaaggaaggcgacgaccggcccttcttttggctgttcgagaatgtggtggccatgggagtcagcgacaagcgggatattagccggttcctggagagcaaccccgtgatgatcgatgccaaggaagtgagcgccgcccaccgggccagatacttctggggcaatctgcctggcatgaacagacccctggccagcaccgtgaacgacaagctggagctgcaggagtgcctggagcacggccggatcgccaagttcagcaaggtgagaaccatcaccacccgaagcaacagcatcaaacaaggcaaggaccagcactttcctgtgttcatgaacgagaaggaggacatcctgtggtgtaccgagatggagagagtgttcgggttcccagtccactacacagatgtcagcaacatgtctagactggccagacagagactgctgggaagaagctggtccgtccctgtgatcagacacctgttcgcccctctgaaggagtacttcgcctgcgtgagcagcggcaacagcaacgccaacagccggggccccagcttctctagcggcctggtgccactgtccctgagagggagccacatgggccccatggagatctacaaaaccgtgagcgcctggaagcggcagcctgtgcgcgtgctgagcctgtttcggaatatcgataaagtcctgaaaagcctgggattcctggagagcggctctggctccggcggtggcaccctgaagtacgtggaggatgtgacaaacgtggtcagacgggatgtggagaagtggggccccttcgatctggtgtacggcagcacccaacccctgggcagctcttgtgaccggtgccctggctggtacatgtttcagttccaccggatcctgcagtacgccctgccgagacaggagtcccagcggccattcttttggattttcatggacaacttgctgctgaccgaggatgaccaggaaactaccactcggttcctgcagaccgaagccgtgaccctgcaggacgtgagaggccgggactaccagaacgccatgcgggtgtggtccaacatccctggactgaaaagcaagcacgcacctctgacccctaaagaagaggagtacctgcaggcccaggtgcggagcagaagcaagctggacgcccctaaggtggatctgctggtgaagaattgcctcctgcccctgagagagtacttcaagtatttcagccagaatagtctgcccctgggaggcagcggcggcggcgccctggtgacatttgaggacgtcgccgtgcggttcacccaggaggaatgggctctgctggatccttctcagaaaatcctgtaccgggacgtgatgagagagacataccggaatctgacctccgtgggcatcaactgggaatgttgggaccttgaagcctgcttcagaagcctgggaagaaacctgagagtgcaggtggtgaagagaaagtgcgagctgaccaacagcggcccctgcgccgagggcggcccaagcagcggcgcccctcctcccagcggcggcagcccagccggctccccaacctctaccgaggagggcacctctgagtccgccacccccgagagcggccctggcacctccaccgagcccagcgagggcagcgcacccggcagccctgccggcagccccacctccacagaggagggaaccagcaccgagcccagcgaaggcagcgccccaggcaccagcaccgagcctagtgagcaggagattaaacggatcaacaagatcagaagaagacttgtgaaagacagcaacaccaagaaggccggcaagacaggccccatgaaaaccctgctggttagagtgatgacacccgatctgagagagcggctggaaaacctgagaaagaagcctgaaaatatcccccagcccatcagcaatacatctagagccaacctgaataagctgctgaccgattacaccgaaatgaagaaggcgatcctgcatgtgtactgggaagagttccagaaggaccctgtgggcctgatgagccgggtggcccagcctgccagcaagaagatcgatcagaacaagctgaaacctgagatggacgagaagggcaacctgaccaccgccggctttgcctgctctcagtgtggccagcccctgttcgtgtacaagctggagcaggtgtctgagaagggcaaggcttacaccaactacttcggacggtgcaatgtggccgagcacgaaaagctgatcctgctggcccagctgaagcccgagaaggatagcgacgaagccgtgacatatagcctgggaaagtttgggcagagggccctggatttctacagcattcatgtgaccaaggagtccacccaccccgtgaagcccctggcccagatcgccggaaacagatacgcctccggacctgtgggaaaggccctgagcgacgcatgtatgggcacaatcgcctccttcctgtctaagtaccaggacatcatcatcgaacaccagaaggtggtgaagggcaaccagaagagactggagagcctgcgggagctggccggcaaggaaaacctggaataccctagcgtgaccctgccacctcagcctcacaccaaggagggcgttgatgcctacaacgaagtgatcgcccgggtgcgaatgtgggtgaacctgaacctgtggcagaagctgaagctaagcagagatgatgccaagcctctgctgagactgaagggattcccttcctttcctctggtcgagagacaggccaacgaagtggactggtgggacatggtgtgtaacgtgaagaagctgatcaacgagaaaaaggaggatggcaaggtgttttggcagaatctggctggctacaagagacaggaagccctgagaccatacctgagcagcgaggaagatcggaagaagggaaagaaattcgctcggtaccagctgggcgacctgctgctgcacctggaaaagaagcacggcgaggactggggaaaggtgtacgacgaggcctgggagcggattgacaagaaagtggaaggcctgagcaagcacatcaagctggaagaggaacggagaagcgaggacgcccagagcaaggccgccctgaccgactggctgcgggctaaggccagcttcgtgatcgagggcctgaaggaggccgacaaggacgagttctgcagatgcgagctgaagctgcagaagtggtacggggacctgcggggaaagcccttcgccatcgaagccgagaacagcatcctggacatcagcggcttcagcaagcagtacaactgtgccttcatctggcagaaggacggcgtgaagaagctgaacctgtacctgatcatcaactacttcaagggcggcaagctgcggttcaagaagatcaaacctgaagccttcgaagccaacagattctacaccgtgatcaacaaaaagagcggcgagatcgtgcccatggaggtgaacttcaacttcgacgaccccaacctgatcatcctgcctctggcctttggcaagagacagggcagagaattcatctggaacgacctgctgtccctggaaaccggcagcctgaagctggccaacggaagagtgatcgagaagacactgtacaacagaagaacccggcaggatgagcctgccctgttcgtggccctgaccttcgagcggcgggaggtcctggactcctccaatatcaaaccaatgaacctgatcggcgtggcaagaggcgaaaacatccccgccgtgatcgccctgaccgaccccgagggctgcccactgagccggtttaaggatagcctgggaaacccaacccacatcctgagaatcggcgagagctataaggagaagcagcggaccatccaggccaagaaggaggtggagcagcggagagccggcggctacagccggaagtacgccagcaaagccaagaatctggcagacgatatggtgagaaacaccgctagagatctgctgtactacgccgtgacccaggatgccatgctgatcttcgccaacctgagccggggcttcggccggcagggcaagcggaccttcatggccgagagacagtacacacggatggaggactggctgaccgccaagctggcctacgagggcctgagcaagacctacctgtccaagacactggcccagtacacctccaagacatgcagcaactgtgggtttaccatcaccagcgccgactacgacagggtgctggagaagctgaagaagacagcaacaggctggatgaccacaattaacggcaaggagctgaaggtggagggccagattacctactacaacagatacaagagacagaacgtagtcaaggacctgtccgtcgagctggatagactgagcgaagaatctgtgaacaacgacatctcctcctggacaaagggcagaagcggagaagctctgagcctcctgaagaaaagattctcccatagacccgtgcaggagaagttcgtgtgcctgaactgcggcttcgagacacacgcagccgagcaagccgccctgaacatcgccagatcctggctgttcctgcggagccaggagtacaagaaataccagacaaacaagacaaccggcaacaccgataagagagccttcgtcgagacctggcagtccttttaccggaagaagcttaaggaggtgtggaaacctgccgtgcggtctggcggatctggcggaggctcctctacacctgtgaccttcgaggatgtggtggtctacttcaccgccgctgagtgggtgcacctgacaaactggcaaagagatttttatcaggccgtgatgatggaaacctacgagctggtggccagcgtggctggcgacggcgttccaatggccgaggacgaggaaggcggagtggaaagacccgtgtggcagtacatccccagaggcaagcggcggagaaagacccctcagcctcgcgccgacggatctggctccggcagcggccccaagaaaaagagaaaagtctaagctgccttctgcggggcttgccttctggccatgcccttcttctctcccttgcacctgtacctcttggtctttgaataaagcctgagtaggaaggctagcaaaaaaaaaaaaaaaaaaaaaaaaaaaaaaaaaaaaaaaaaaaaaaaaaaaaaaaaaaaagcatgcaaaaaaaaaaaaaaaaaaaaaaaaaaaaaaaaaaaaaaaaaaaaaaaaaaaaaaaaa

SEQ ID NO: 21884 - RNA, 5896 nt, synthetic construct
  source 1..5896: mol_type = other RNA
aggaaataagagagaaaagaagagtaagaagaaatataagagccaccatggcccctaagaagaagcgtaaagtgagccggatggaacgcctcgtctacgaggtgcggcagaagtgcagaaacatcgaggacatctgcatctcctgcggatctctgaacgtgaccctggagcacccactgttcatcggcggcatgtgccagaactgtaaaaactgttttctggagtgtgcctatcaatacgacgatgacggctaccagagctactgcaccatctgttgcggcggaagagaggtgctgatgtgtggaaataacaactgctgccggtgcttctgcgtggaatgcgtggacctgctggtgggccccggcgccgcccaggccgctattaaggaagatccttggaactgctacatgtgcggccacaagggcacatacggcctgctgagacggagagaggactggcctagcagactgcagatgttcttcgccaataaccacgaccaggagttcgacccccctaaggtgtaccctcccgtccccgccgagaagagaaagcccatccgggtcctgagcctgttcgatggcatcgccaccggtctgctggtgctgaaggacctgggcatccaggtggataggtacattgcctccgaggtgtgcgaggactccatcaccgtgggaatggtgcgtcatcagggcaagatcatgtacgtgggcgacgtgcggagcgtgacacagaagcatatccaggagtggggccctttcgacctggtgatcggcggcagcccttgcaatgacctgagcatcgtgaacccagcccggaagggcctgtacgagggaaccggcagactgttcttcgagttttacagactgctgcacgacgcccggcctaaggaaggcgacgaccggcccttcttttggctgttcgagaatgtggtggccatgggagtcagcgacaagcgggatattagccggttcctggagagcaaccccgtgatgatcgatgccaaggaagtgagcgccgcccaccgggccagatacttctggggcaatctgcctggcatgaacagacccctggccagcaccgtgaacgacaagctggagctgcaggagtgcctggagcacggccggatcgccaagttcagcaaggtgagaaccatcaccacccgaagcaacagcatcaaacaaggcaaggaccagcactttcctgtgttcatgaacgagaaggaggacatcctgtggtgtaccgagatggagagagtgttcgggttcccagtccactacacagatgtcagcaacatgtctagactggccagacagagactgctgggaagaagctggtccgtccctgtgatcagacacctgttcgcccctctgaaggagtacttcgcctgcgtgagcagcggcaacagcaacgccaacagccggggccccagcttctctagcggcctggtgccactgtccctgagagggagccacatgggccccatggagatctacaaaaccgtgagcgcctggaagcggcagcctgtgcgcgtgctgagcctgtttcggaatatcgataaagtcctgaaaagcctgggattcctggagagcggctctggctccggcggtggcaccctgaagtacgtggaggatgtgacaaacgtggtcagacgggatgtggagaagtggggccccttcgatctggtgtacggcagcacccaacccctgggcagctcttgtgaccggtgccctggctggtacatgtttcagttccaccggatcctgcagtacgccctgccgagacaggagtcccagcggccattcttttggattttcatggacaacttgctgctgaccgaggatgaccaggaaactaccactcggttcctgcagaccgaagccgtgaccctgcaggacgtgagaggccgggactaccagaacgccatgcgggtgtggtccaacatccctggactgaaaagcaagcacgcacctctgacccctaaagaagaggagtacctgcaggcccaggtgcggagcagaagcaagctggacgcccctaaggtggatctgctggtgaagaattgcctcctgcccctgagagagtacttcaagtatttcagccagaatagtctgcccctgggaagcggcggatctggcggcagcggcggctcccctgtgcccagcaccccacctacccctagccctagcacaccccccacccctgccctggtgacatttgaggacgtcgccgtgcggttcacccaggaggaatgggctctgctggatccttctcagaaaatcctgtaccgggacgtgatgagagagacataccggaatctgacctccgtgggcatcaactgggaatgttgggaccttgaagcctgcttcagaagcctgggaagaaacctgagagtgcaggtggtgaagagaaagtgcgagctgaccaacagcggcccctgcgccgaggccttccccgccgcccctgctcctgcccaggagattaaacggatcaacaagatcagaagaagacttgtgaaagacagcaacaccaagaaggccggcaagacaggccccatgaaaaccctgctggttagagtgatgacacccgatctgagagagcggctggaaaacctgagaaagaagcctgaaaatatcccccagcccatcagcaatacatctagagccaacctgaataagctgctgaccgattacaccgaaatgaagaaggcgatcctgcatgtgtactgggaagagttccagaaggaccctgtgggcctgatgagccgggtggcccagcctgccagcaagaagatcgatcagaacaagctgaaacctgagatggacgagaagggcaacctgaccaccgccggctttgcctgctctcagtgtggccagcccctgttcgtgtacaagctggagcaggtgtctgagaagggcaaggcttacaccaactacttcggacggtgcaatgtggccgagcacgaaaagctgatcctgctggcccagctgaagcccgagaaggatagcgacgaagccgtgacatatagcctgggaaagtttgggcagagggccctggatttctacagcattcatgtgaccaaggagtccacccaccccgtgaagcccctggcccagatcgccggaaacagatacgcctccggacctgtgggaaaggccctgagcgacgcatgtatgggcacaatcgcctccttcctgtctaagtaccaggacatcatcatcgaacaccagaaggtggtgaagggcaaccagaagagactggagagcctgcgggagctggccggcaaggaaaacctggaataccctagcgtgaccctgccacctcagcctcacaccaaggagggcgttgatgcctacaacgaagtgatcgcccgggtgcgaatgtgggtgaacctgaacctgtggcagaagctgaagctaagcagagatgatgccaagcctctgctgagactgaagggattcccttcctttcctctggtcgagagacaggccaacgaagtggactggtgggacatggtgtgtaacgtgaagaagctgatcaacgagaaaaaggaggatggcaaggtgttttggcagaatctggctggctacaagagacaggaagccctgagaccatacctgagcagcgaggaagatcggaagaagggaaagaaattcgctcggtaccagctgggcgacctgctgctgcacctggaaaagaagcacggcgaggactggggaaaggtgtacgacgaggcctgggagcggattgacaagaaagtggaaggcctgagcaagcacatcaagctggaagaggaacggagaagcgaggacgcccagagcaaggccgccctgaccgactggctgcgggctaaggccagcttcgtgatcgagggcctgaaggaggccgacaaggacgagttctgcagatgcgagctgaagctgcagaagtggtacggggacctgcggggaaagcccttcgccatcgaagccgagaacagcatcctggacatcagcggcttcagcaagcagtacaactgtgccttcatctggcagaaggacggcgtgaagaagctgaacctgtacctgatcatcaactacttcaagggcggcaagctgcggttcaagaagatcaaacctgaagccttcgaagccaacagattctacaccgtgatcaacaaaaagagcggcgagatcgtgcccatggaggtgaacttcaacttcgacgaccccaacctgatcatcctgcctctggcctttggcaagagacagggcagagaattcatctggaacgacctgctgtccctggaaaccggcagcctgaagctggccaacggaagagtgatcgagaagacactgtacaacagaagaacccggcaggatgagcctgccctgttcgtggccctgaccttcgagcggcgggaggtcctggactcctccaatatcaaaccaatgaacctgatcggcgtggcaagaggcgaaaacatccccgccgtgatcgccctgaccgaccccgagggctgcccactgagccggtttaaggatagcctgggaaacccaacccacatcctgagaatcggcgagagctataaggagaagcagcggaccatccaggccaagaaggaggtggagcagcggagagccggcggctacagccggaagtacgccagcaaagccaagaatctggcagacgatatggtgagaaacaccgctagagatctgctgtactacgccgtgacccaggatgccatgctgatcttcgccaacctgagccggggcttcggccggcagggcaagcggaccttcatggccgagagacagtacacacggatggaggactggctgaccgccaagctggcctacgagggcctgagcaagacctacctgtccaagacactggcccagtacacctccaagacatgcagcaactgtgggtttaccatcaccagcgccgactacgacagggtgctggagaagctgaagaagacagcaacaggctggatgaccacaattaacggcaaggagctgaaggtggagggccagattacctactacaacagatacaagagacagaacgtagtcaaggacctgtccgtcgagctggatagactgagcgaagaatctgtgaacaacgacatctcctcctggacaaagggcagaagcggagaagctctgagcctcctgaagaaaagattctcccatagacccgtgcaggagaagttcgtgtgcctgaactgcggcttcgagacacacgcagccgagcaagccgccctgaacatcgccagatcctggctgttcctgcggagccaggagtacaagaaataccagacaaacaagacaaccggcaacaccgataagagagccttcgtcgagacctggcagtccttttaccggaagaagcttaaggaggtgtggaaacctgccgtgcggtctggcggatctggcggaggctcctctacacctgtgaccttcgaggatgtggtggtctacttcaccgccgctgagtgggtgcacctgacaaactggcaaagagatttttatcaggccgtgatgatggaaacctacgagctggtggccagcgtggctggcgacggcgttccaatggccgaggacgaggaaggcggagtggaaagacccgtgtggcagtacatccccagaggcaagcggcggagaaagacccctcagcctcgcgccgacggatctggctccggcagcggccccaagaaaaagagaaaagtctaagctgccttctgcggggcttgccttctggccatgcccttcttctctcccttgcacctgtacctcttggtctttgaataaagcctgagtaggaaggctagcaaaaaaaaaaaaaaaaaaaaaaaaaaaaaaaaaaaaaaaaaaaaaaaaaaaaaaaaaaaaaaaaaaaaaaaaaaaaaaaa

SEQ ID NO: 21885 - RNA, 3233 nt, synthetic construct; identical to SEQ ID NO: 21880
  modified_base 1..3233: mod_base = OTHER; note = Each t is m1f
  source 1..3233: mol_type = other RNA

SEQ ID NO: 21886 - RNA, 5848 nt, synthetic construct; identical to SEQ ID NO: 21881
  modified_base 1..5848: mod_base = OTHER; note = Each t is m1f
  source 1..5848: mol_type = other RNA

SEQ ID NO: 21887 - RNA, 4991 nt, synthetic construct; identical to SEQ ID NO: 21882
  modified_base 1..4991: mod_base = OTHER; note = Each t is m1f
  source 1..4991: mol_type = other RNA

SEQ ID NO: 21888 - RNA, 6086 nt, synthetic construct; identical to SEQ ID NO: 21883
  modified_base 1..6086: mod_base = OTHER; note = Each t is m1f
  source 1..6086: mol_type = other RNA

SEQ ID NO: 21889 - RNA, 6043 nt, synthetic construct
  modified_base 1..6043: mod_base = OTHER; note = Each t is m1f
  source 1..6043: mol_type = other RNA
aggaaataagagagaaaagaagagtaagaagaaatataagagccaccatggcccctaagaagaagcgtaaagtgagccggatggaacgcctcgtctacgaggtgcggcagaagtgcagaaacatcgaggacatctgcatctcctgcggatctctgaacgtgaccctggagcacccactgttcatcggcggcatgtgccagaactgtaaaaactgttttctggagtgtgcctatcaatacgacgatgacggctaccagagctactgcaccatctgttgcggcggaagagaggtgctgatgtgtggaaataacaactgctgccggtgcttctgcgtggaatgcgtggacctgctggtgggccccggcgccgcccaggccgctattaaggaagatccttggaactgctacatgtgcggccacaagggcacatacggcctgctgagacggagagaggactggcctagcagactgcagatgttcttcgccaataaccacgaccaggagttcgacccccctaaggtgtaccctcccgtccccgccgagaagagaaagcccatccgggtcctgagcctgttcgatggcatcgccaccggtctgctggtgctgaaggacctgggcatccaggtggataggtacattgcctccgaggtgtgcgaggactccatcaccgtgggaatggtgcgtcatcagggcaagatcatgtacgtgggcgacgtgcggagcgtgacacagaagcatatccaggagtggggccctttcgacctggtgatcggcggcagcccttgcaatgacctgagcatcgtgaacccagcccggaagggcctgtacgagggaaccggcagactgttcttcgagttttacagactgctgcacgacgcccggcctaaggaaggcgacgaccggcccttcttttggctgttcgagaatgtggtggccatgggagtcagcgacaagcgggatattagccggttcctggagagcaaccccgtgatgatcgatgccaaggaagtgagcgccgcccaccgggccagatacttctggggcaatctgcctggcatgaacagacccctggccagcaccgtgaacgacaagctggagctgcaggagtgcctggagcacggccggatcgccaagttcagcaaggtgagaaccatcaccacccgaagcaacagcatcaaacaaggcaaggaccagcactttcctgtgttcatgaacgagaaggaggacatcctgtggtgtaccgagatggagagagtgttcgggttcccagtccactacacagatgtcagcaacatgtctagactggccagacagagactgctgggaagaagctggtccgtccctgtgatcagacacctgttcgcccctctgaaggagtacttcgcctgcgtgagcagcggcaacagcaacgccaacagccggggccccagcttctctagcggcctggtgccactgtccctgagagggagccacatgggccccatggagatctacaaaaccgtgagcgcctggaagcggcagcctgtgcgcgtgctgagcctgtttcggaatatcgataaagtcctgaaaagcctgggattcctggagagcggctctggctccggcggtggcaccctgaagtacgtggaggatgtgacaaacgtggtcagacgggatgtggagaagtggggccccttcgatctggtgtacggcagcacccaacccctgggcagctcttgtgaccggtgccctggctggtacatgtttcagttccaccggatcctgcagtacgccctgccgagacaggagtcccagcggccattcttttggattttcatggacaacttgctgctgaccgaggatgaccaggaaactaccactcggttcctgcagaccgaagccgtgaccctgcaggacgtgagaggccgggactaccagaacgccatgcgggtgtggtccaacatccctggactgaaaagcaagcacgcacctctgacccctaaagaagaggagtacctgcaggcccaggtgcggagcagaagcaagctggacgcccctaaggtggatctgctggtgaagaattgcctcctgcccctgagagagtacttcaagtatttcagccagaatagtctgcccctgggaggcagcggcggcggctctacacctgtgaccttcgaggatgtggtggtctacttcaccgccgctgagtgggtgcacctgacaaactggcaaagagatttttatcaggccgtgatgatggaaacctacgagctggtggccagcgtggctggcgacggcgttccaatggccgaggacgaggaaggcggagtggaaagacccgtgtggcagtacatccccagaggcaagcggcggagaaagacccctcagcctcgcgccgacggcggcccaagcagcggcgcccctcctcccagcggcggcagcccagccggctccccaacctctaccgaggagggcacctctgagtccgccacccccgagagcggccctggcacctccaccgagcccagcgagggcagcgcacccggcagccctgccggcagccccacctccacagaggagggaaccagcaccgagcccagcgaaggcagcgccccaggcaccagcaccgagcctagtgagcaggagattaaacggatcaacaagatcagaagaagacttgtgaaagacagcaacaccaagaaggccggcaagacaggccccatgaaaaccctgctggttagagtgatgacacccgatctgagagagcggctggaaaacctgagaaagaagcctgaaaatatcccccagcccatcagcaatacatctagagccaacctgaataagctgctgaccgattacaccgaaatgaagaaggcgatcctgcatgtgtactgggaagagttccagaaggaccctgtgggcctgatgagccgggtggcccagcctgccagcaagaagatcgatcagaacaagctgaaacctgagatggacgagaagggcaacctgaccaccgccggctttgcctgctctcagtgtggccagcccctgttcgtgtacaagctggagcaggtgtctgagaagggcaaggcttacaccaactacttcggacggtgcaatgtggccgagcacgaaaagctgatcctgctggcccagctgaagcccgagaaggatagcgacgaagccgtgacatatagcctgggaaagtttgggcagagggccctggatttctacagcattcatgtgaccaaggagtccacccaccccgtgaagcccctggcccagatcgccggaaacagatacgcctccggacctgtgggaaaggccctgagcgacgcatgtatgggcacaatcgcctccttcctgtctaagtaccaggacatcatcatcgaacaccagaaggtggtgaagggcaaccagaagagactggagagcctgcgggagctggccggcaaggaaaacctggaataccctagcgtgaccctgccacctcagcctcacaccaaggagggcgttgatgcctacaacgaagtgatcgcccgggtgcgaatgtgggtgaacctgaacctgtggcagaagctgaagctaagcagagatgatgccaagcctctgctgagactgaagggattcccttcctttcctctggtcgagagacaggccaacgaagtggactggtgggacatggtgtgtaacgtgaagaagctgatcaacgagaaaaaggaggatggcaaggtgttttggcagaatctggctggctacaagagacaggaagccctgagaccatacctgagcagcgaggaagatcggaagaagggaaagaaattcgctcggtaccagctgggcgacctgctgctgcacctggaaaagaagcacggcgaggactggggaaaggtgtacgacgaggcctgggagcggattgacaagaaagtggaaggcctgagcaagcacatcaagctggaagaggaacggagaagcgaggacgcccagagcaaggccgccctgaccgactggctgcgggctaaggccagcttcgtgatcgagggcctgaaggaggccgacaaggacgagttctgcagatgcgagctgaagctgcagaagtggtacggggacctgcggggaaagcccttcgccatcgaagccgagaacagcatcctggacatcagcggcttcagcaagcagtacaactgtgccttcatctggcagaaggacggcgtgaagaagctgaacctgtacctgatcatcaactacttcaagggcggcaagctgcggttcaagaagatcaaacctgaagccttcgaagccaacagattctacaccgtgatcaacaaaaagagcggcgagatcgtgcccatggaggtgaacttcaacttcgacgaccccaacctgatcatcctgcctctggcctttggcaagagacagggcagagaattcatctggaacgacctgctgtccctggaaaccggcagcctgaagctggccaacggaagagtgatcgagaagacactgtacaacagaagaacccggcaggatgagcctgccctgttcgtggccctgaccttcgagcggcgggaggtcctggactcctccaatatcaaaccaatgaacctgatcggcgtggcaagaggcgaaaacatccccgccgtgatcgccctgaccgaccccgagggctgcccactgagccggtttaaggatagcctgggaaacccaacccacatcctgagaatcggcgagagctataaggagaagcagcggaccatccaggccaagaaggaggtggagcagcggagagccggcggctacagccggaagtacgccagcaaagccaagaatctggcagacgatatggtgagaaacaccgctagagatctgctgtactacgccgtgacccaggatgccatgctgatcttcgccaacctgagccggggcttcggccggcagggcaagcggaccttcatggccgagagacagtacacacggatggaggactggctgaccgccaagctggcctacgagggcctgagcaagacctacctgtccaagacactggcccagtacacctccaagacatgcagcaactgtgggtttaccatcaccagcgccgactacgacagggtgctggagaagctgaagaagacagcaacaggctggatgaccacaattaacggcaaggagctgaaggtggagggccagattacctactacaacagatacaagagacagaacgtagtcaaggacctgtccgtcgagctggatagactgagcgaagaatctgtgaacaacgacatctcctcctggacaaagggcagaagcggagaagctctgagcctcctgaagaaaagattctcccatagacccgtgcaggagaagttcgtgtgcctgaactgcggcttcgagacacacgcagccgagcaagccgccctgaacatcgccagatcctggctgttcctgcggagccaggagtacaagaaataccagacaaacaagacaaccggcaacaccgataagagagccttcgtcgagacctggcagtccttttaccggaagaagcttaaggaggtgtggaaacctgccgtgcggtctggcggatctggcggaggctcctctacacctgtgaccttcgaggatgtggtggtctacttcaccgccgctgagtgggtgcacctgacaaactggcaaagagatttttatcaggccgtgatgatggaaacctacgagctggtggccagcgtggctggcgacggcgttccaatggccgaggacgaggaaggcggagtggaaagacccgtgtggcagtacatccccagaggcaagcggcggagaaagacccctcagcctcgcgccgacggatctggctccggcagcggccccaagaaaaagagaaaagtctaagctgccttctgcggggcttgccttctggccatgcccttcttctctcccttgcacctgtacctcttggtctttgaataaagcctgagtaggaaggctagcaaaaaaaaaaaaaaaaaaaaaaaaaaaaaaaaaaaaaaaaaaaaaaaaaaaaaaaaaaaaaaaaaaaaaaaaaaaaaaaa

SEQ ID NO: 21890 - RNA, 5896 nt, synthetic construct; identical to SEQ ID NO: 21884
  modified_base 1..5896: mod_base = OTHER; note = Each t is m1f
  source 1..5896: mol_type = other RNA

SEQ ID NO: 21891 - RNA, 109 nt, synthetic construct
  source 1..109: mol_type = other RNA
actggcgcttctatctgattactctgagcgccatcaccagcgactatgtcgtagtgggtaaagctccctcttcggagggagcatcagaggaggaggacggcctggccga

SEQ ID NO: 21892 - RNA, 109 nt, synthetic construct
  source 1..109: mol_type = other RNA
actggcgcttctatctgattactctgagcgccatcaccagcgactatgtcgtagtgggtaaagctccctcttcggagggagcatcagagagggtgtgggtgcttgacgc

SEQ ID NO: 21893 - RNA, 109 nt, synthetic construct
  source 1..109: mol_type = other RNA
actggcgcttctatctgattactctgagcgccatcaccagcgactatgtcgtagtgggtaaagctccctcttcggagggagcatcagaggggtctgagcctggaggagt

SEQ ID NO: 21894 - RNA, 109 nt, synthetic construct
  source 1..109: mol_type = other RNA
actggcgcttctatctgattactctgagcgccatcaccagcgactatgtcgtagtgggtaaagctccctcttcggagggagcatcagagactggccttaacctggcagc

SEQ ID NO: 21895 - RNA, 109 nt, synthetic construct; identical to SEQ ID NO: 21877
  source 1..109: mol_type = other RNA

SEQ ID NO: 21896 - RNA, 100 nt, synthetic construct
  source 1..100: mol_type = other RNA
cccgcaccttggcgcagcgggttttagagctagaaatagcaagttaaaataaggctagtccgttatcaacttgaaaaagtggcaccgagtcggtgctttt

SEQ ID NO: 21897 - RNA, 109 nt, synthetic construct; identical to SEQ ID NO: 21891
  modified_base 1..4: mod_base = OTHER; note = linked via phosphorothioate
  modified_base 1: mod_base = OTHER; note = 2'-O-methyl adenosine
  modified_base 2: mod_base = cm
  modified_base 3: mod_base = um
  modified_base 106..109: mod_base = OTHER; note = linked via phosphorothioate
  modified_base 107: mod_base = cm
  modified_base 108: mod_base = gm
  modified_base 109: mod_base = OTHER; note = 2'-O-methyl adenosine
  source 1..109: mol_type = other RNA

SEQ ID NO: 21898 - RNA, 109 nt, synthetic construct; identical to SEQ ID NO: 21892
  modified_base 1..4: mod_base = OTHER; note = linked via phosphorothioate
  modified_base 1: mod_base = OTHER; note = 2'-O-methyl adenosine
  modified_base 2: mod_base = cm
  modified_base 3: mod_base = um
  modified_base 106..109: mod_base = OTHER; note = linked via phosphorothioate
  modified_base 107: mod_base = cm
  modified_base 108: mod_base = gm
  modified_base 109: mod_base = cm
  source 1..109: mol_type = other RNA

SEQ ID NO: 21899 - RNA, 109 nt, synthetic construct; identical to SEQ ID NO: 21893
  modified_base 1..4: mod_base = OTHER; note = linked via phosphorothioate
  modified_base 1: mod_base = OTHER; note = 2'-O-methyl adenosine
  modified_base 2: mod_base = cm
  modified_base 3: mod_base = um
  modified_base 106..109: mod_base = OTHER; note = linked via phosphorothioate
  modified_base 107: mod_base = OTHER; note = 2'-O-methyl adenosine
  modified_base 108: mod_base = gm
  modified_base 109: mod_base = um
  source 1..109: mol_type = other RNA

SEQ ID NO: 21900 - RNA, 109 nt, synthetic construct; identical to SEQ ID NO: 21894
  modified_base 1..4: mod_base = OTHER; note = linked via phosphorothioate
  modified_base 1: mod_base = OTHER; note = 2'-O-methyl adenosine
  modified_base 2: mod_base = cm
  modified_base 3: mod_base = um
  modified_base 106..109: mod_base = OTHER; note = linked via phosphorothioate
  modified_base 107: mod_base = OTHER; note = 2'-O-methyl adenosine
  modified_base 108: mod_base = gm
  modified_base 109: mod_base = cm
  source 1..109: mol_type = other RNA

SEQ ID NO: 21901 - RNA, 109 nt, synthetic construct; identical to SEQ ID NO: 21877
  modified_base 1..4: mod_base = OTHER; note = linked via phosphorothioate
  modified_base 1: mod_base = OTHER; note = 2'-O-methyl adenosine
  modified_base 2: mod_base = cm
  modified_base 3: mod_base = um
  modified_base 106..109: mod_base = OTHER; note = linked via phosphorothioate
  modified_base 107: mod_base = um
  modified_base 108: mod_base = cm
  modified_base 109: mod_base = cm
  source 1..109: mol_type = other RNA

SEQ ID NO: 21902 - RNA, 100 nt, synthetic construct; identical to SEQ ID NO: 21896
  modified_base 1..4: mod_base = OTHER; note = linked via phosphorothioate
  modified_base 1..3: mod_base = cm
  modified_base 29: mod_base = gm
  modified_base 30: mod_base = cm
  modified_base 31: mod_base = um
  modified_base 32: mod_base = OTHER; note = 2'-O-methyl adenosine
  modified_base 33: mod_base = gm
  modified_base 34..36: mod_base = OTHER; note = 2'-O-methyl adenosine
  modified_base 37: mod_base = um
  modified_base 38: mod_base = OTHER; note = 2'-O-methyl adenosine
  modified_base 39: mod_base = gm
  modified_base 40: mod_base = cm
  modified_base 69: mod_base = OTHER; note = 2'-O-methyl adenosine
  modified_base 70: mod_base = cm
  modified_base 71..72: mod_base = um
  modified_base 73: mod_base = gm
  modified_base 74..78: mod_base = OTHER; note = 2'-O-methyl adenosine
  modified_base 79: mod_base = gm
  modified_base 80: mod_base = um
  modified_base 81..82: mod_base = gm
  modified_base 83: mod_base = cm
  modified_base 84: mod_base = OTHER; note = 2'-O-methyl adenosine
  modified_base 85..86: mod_base = cm
  modified_base 87: mod_base = gm
  modified_base 88: mod_base = OTHER; note = 2'-O-methyl adenosine
  modified_base 89: mod_base = gm
  modified_base 90: mod_base = um
  modified_base 91: mod_base = cm
  modified_base 92..93: mod_base = gm
  modified_base 94: mod_base = um
  modified_base 95: mod_base = gm
  modified_base 96: mod_base = cm
  modified_base 97..100: mod_base = OTHER; note = linked via phosphorothioate
  modified_base 97..100: mod_base = um
  source 1..100: mol_type = other RNA

SEQ ID NO: 21903 - protein, 1749 aa, synthetic construct; identical to SEQ ID NO: 1918

SEQ ID NO: 21904 - protein, 1875 aa, synthetic construct; identical to SEQ ID NO: 1916

SEQ ID NO: 21905 - protein, 1730 aa, synthetic construct
MAPKKKRKVSRVNGSGSGGGMNHDQEFDPPKVYPPVPAEKRKPIRVLSLFDGIATGLLVLKDLGIQVDRYIASEVCEDSITVGMVRHQGKIMYVGDVRSVTQKHIQEWGPFDLVIGGSPCNDLSIVNPARKGLYEGTGRLFFEFYRLLHDARPKEGDDRPFFWLFENVVAMGVSDKRDISRFLESNPVMIDAKEVSAAHRARYFWGNLPGMNRPLASTVNDKLELQECLEHGRIAKFSKVRTITTRSNSIKQGKDQHFPVFMNEKEDILWCTEMERVFGFPVHYTDVSNMSRLARQRLLGRSWSVPVIRHLFAPLKEYFACVSSGNSNANSRGPSFSSGLVPLSLRGSHMGPMEIYKTVSAWKRQPVRVLSLFRNIDKVLKSLGFLESGSGSGGGTLKYVEDVTNVVRRDVEKWGPFDLVYGSTQPLGSSCDRCPGWYMFQFHRILQYALPRQESQRPFFWIFMDNLLLTEDDQETTTRFLQTEAVTLQDVRGRDYQNAMRVWSNIPGLKSKHAPLTPKEEEYLQAQVRSRSKLDAPKVDLLVKNCLLPLREYFKYFSQNSLPLGGPSSGAPPPSGGSPAGSPTSTEEGTSESATPESGPGTSTEPSEGSAPGSPAGSPTSTEEGTSTEPSEGSAPGTSTEPSEGGSGGGSAQEIKRINKIRRRLVKDSNTKKAGKTGPMKTLLVRVMTPDLRERLENLRKKPENIPQPISNTSRANLNKLLTDYTEMKKAILHVYWEEFQKDPVGLMSRVAQPASKKIDQNKLKPEMDEKGNLTTAGFACSQCGQPLFVYKLEQVSEKGKAYTNYFGRCNVAEHEKLILLAQLKPEKDSDEAVTYSLGKFGQRALDFYSIHVTKESTHPVKPLAQIAGNRYASGPVGKALSDACMGTIASFLSKYQDIIIEHQKVVKGNQKRLESLRELAGKENLEYPSVTLPPQPHTKEGVDAYNEVIARVRMWVNLNLWQKLKLSRDDAKPLLRLKGFPSFPLVERQANEVDWWDMVCNVKKLINEKKEDGKVFWQNLAGYKRQEALRPYLSSEEDRKKGKKFARYQLGDLLLHLEKKHGEDWGKVYDEAWERIDKKVEGLSKHIKLEEERRSEDAQSKAALTDWLRAKASFVIEGLKEADKDEFCRCELKLQKWYGDLRGKPFAIEAENSILDISGFSKQYNCAFIWQKDGVKKLNLYLIINYFKGGKLRFKKIKPEAFEANRFYTVINKKSGEIVPMEVNFNFDDPNLIILPLAFGKRQGREFIWNDLLSLETGSLKLANGRVIEKTLYNRRTRQDEPALFVALTFERREVLDSSNIKPMNLIGVARGENIPAVIALTDPEGCPLSRFKDSLGNPTHILRIGESYKEKQRTIQAKKEVEQRRAGGYSRKYASKAKNLADDMVRNTARDLLYYAVTQDAMLIFANLSRGFGRQGKRTFMAERQYTRMEDWLTAKLAYEGLSKTYLSKTLAQYTSKTCSNCGFTITSADYDRVLEKLKKTATGWMTTINGKELKVEGQITYYNRYKRQNVVKDLSVELDRLSEESVNNDISSWTKGRSGEALSLLKKRFSHRPVQEKFVCLNCGFETHAAEQAALNIARSWLFLRSQEYKKYQTNKTTGNTDKRAFVETWQSFYRKKLKEVWKPAVRSGGSGGGSTSALVTFEDVAVRFTQEEWALLDPSQKILYRDVMRETYRNLTSVGINWECWDLEACFRSLGRNLRVQVVKRKCELTNSGPCAETSPKKKRKV

SEQ ID NO: 21906 - protein, 1730 aa, synthetic construct
MAPKKKRKVSRVNGSGSGGGMNHDQEFDPPKVYPPVPAEKRKPIRVLSLFDGIATGLLVLKDLGIQVDRYIASEVCEDSITVGMVRHQGKIMYVGDVRSVTQKHIQEWGPFDLVIGGSPCNDLSIVNPARKGLYEGTGRLFFEFYRLLHDARPKEGDDRPFFWLFENVVAMGVSDKRDISRFLESNPVMIDAKEVSAAHRARYFWGNLPGMNRPLASTVNDKLELQECLEHGRIAKFSKVRTITTRSNSIKQGKDQHFPVFMNEKEDILWCTEMERVFGFPVHYTDVSNMSRLARQRLLGRSWSVPVIRHLFAPLKEYFACVSSGNSNANSRGPSFSSGLVPLSLRGSHMGPMEIYKTVSAWKRQPVRVLSLFRNIDKVLKSLGFLESGSGSGGGTLKYVEDVTNVVRRDVEKWGPFDLVYGSTQPLGSSCDRCPGWYMFQFHRILQYALPRQESQRPFFWIFMDNLLLTEDDQETTTRFLQTEAVTLQDVRGRDYQNAMRVWSNIPGLKSKHAPLTPKEEEYLQAQVRSRSKLDAPKVDLLVKNCLLPLREYFKYFSQNSLPLGGPSSGAPPPSGGSPAGSPTSTEEGTSESATPESGPGTSTEPSEGSAPGSPAGSPTSTEEGTSTEPSEGSAPGTSTEPSEGGSGGGSAQEIKRINKIRRRLVKDSNTKKAGKTGPMKTLLVRVMTPDLRERLENLRKKPENIPQPISNTSRANLNKLLTDYTEMKKAILHVYWEEFQKDPVGLMSRVAQPASKKIDQNKLKPEMDEKGNLTTAGFACSQCGQPLFVYKLEQVSEKGKAYTNYFGRCNVAEHEKLILLAQLKPEKDSDEAVTYSLGKFGQRALDFYSIHVTKESTHPVKPLAQIAGNRYASGPVGKALSDACMGTIASFLSKYQDIIIEHQKVVKGNQKRLESLRELAGKENLEYPSVTLPPQPHTKEGVDAYNEVIARVRMWVNLNLWQKLKLSRDDAKPLLRLKGFPSFPLVERQANEVDWWDMVCNVKKLINEKKEDGKVFWQNLAGYKRQEALRPYLSSEEDRKKGKKFARYQLGDLLLHLEKKHGEDWGKVYDEAWERIDKKVEGLSKHIKLEEERRSEDAQSKAALTDWLRAKASFVIEGLKEADKDEFCRCELKLQKWYGDLRGKPFAIEAENSILDISGFSKQYNCAFIWQKDGVKKLNLYLIINYFKGGKLRFKKIKPEAFEANRFYTVINKKSGEIVPMEVNFNFDDPNLIILPLAFGKRQGREFIWNDLLSLETGSLKLANGRVIEKTLYNRRTRQDEPALFVALTFERREVLDSSNIKPMNLIGVARGENIPAVIALTDPEGCPLSRFKDSLGNPTHILRIGESYKEKQRTIQAKKEVEQRRAGGYSRKYASKAKNLADDMVRNTARDLLYYAVTQDAMLIFANLSRGFGRQGKRTFMAERQYTRMEDWLTAKLAYEGLSKTYLSKTLAQYTSKTCSNCGFTITSADYDRVLEKLKKTATGWMTTINGKELKVEGQITYYNRYKRQNVVKDLSVELDRLSEESVNNDISSWTKGRSGEALSLLKKRFSHRPVQEKFVCLNCGFETHAAEQAALNIARSWLFLRSQEYKKYQTNKTTGNTDKRAFVETWQSFYRKKLKEVWKPAVRSGGSGGGSTSSTPVTFEDVVVYFTAAEWVHLTNWQRDFYQAVMMETYELVASVAGDGVPMAEDEEGGVERPVWQYIPRGKRRRKTPQPRADTSPKKKRKV

SEQ ID NO: 21907 - protein, 1730 aa, synthetic construct
MAPKKKRKVSRVNGSGSGGGMNHDQEFDPPKVYPPVPAEKRKPIRVLSLFDGIATGLLVLKDLGIQVDRYIASEVCEDSITVGMVRHQGKIMYVGDVRSVTQKHIQEWGPFDLVIGGSPCNDLSIVNPARKGLYEGTGRLFFEFYRLLHDARPKEGDDRPFFWLFENVVAMGVSDKRDISRFLESNPVMIDAKEVSAAHRARYFWGNLPGMNRPLASTVNDKLELQECLEHGRIAKFSKVRTITTRSNSIKQGKDQHFPVFMNEKEDILWCTEMERVFGFPVHYTDVSNMSRLARQRLLGRSWSVPVIRHLFAPLKEYFACVSSGNSNANSRGPSFSSGLVPLSLRGSHMGPMEIYKTVSAWKRQPVRVLSLFRNIDKVLKSLGFLESGSGSGGGTLKYVEDVTNVVRRDVEKWGPFDLVYGSTQPLGSSCDRCPGWYMFQFHRILQYALPRQESQRPFFWIFMDNLLLTEDDQETTTRFLQTEAVTLQDVRGRDYQNAMRVWSNIPGLKSKHAPLTPKEEEYLQAQVRSRSKLDAPKVDLLVKNCLLPLREYFKYFSQNSLPLGGPSSGAPPPSGGSPAGSPTSTEEGTSESATPESGPGTSTEPSEGSAPGSPAGSPTSTEEGTSTEPSEGSAPGTSTEPSEGGSGGGSAQEIKRINKIRRRLVKDSNTKKAGKTGPMKTLLVRVMTPDLRERLENLRKKPENIPQPISNTSRANLNKLLTDYTEMKKAILHVYWEEFQKDPVGLMSRVAQPASKKIDQNKLKPEMDEKGNLTTAGFACSQCGQPLFVYKLEQVSEKGKAYTNYFGRCNVAEHEKLILLAQLKPEKDSDEAVTYSLGKFGQRALDFYSIHVTKESTHPVKPLAQIAGNRYASGPVGKALSDACMGTIASFLSKYQDIIIEHQKVVKGNQKRLESLRELAGKENLEYPSVTLPPQPHTKEGVDAYNEVIARVRMWVNLNLWQKLKLSRDDAKPLLRLKGFPSFPLVERQANEVDWWDMVCNVKKLINEKKEDGKVFWQNLAGYKRQEALRPYLSSEEDRKKGKKFARYQLGDLLLHLEKKHGEDWGKVYDEAWERIDKKVEGLSKHIKLEEERRSEDAQSKAALTDWLRAKASFVIEGLKEADKDEFCRCELKLQKWYGDLRGKPFAIEAENSILDISGFSKQYNCAFIWQKDGVKKLNLYLIINYFKGGKLRFKKIKPEAFEANRFYTVINKKSGEIVPMEVNFNFDDPNLIILPLAFGKRQGREFIWNDLLSLETGSLKLANGRVIEKTLYNRRTRQDEPALFVALTFERREVLDSSNIKPMNLIGVARGENIPAVIALTDPEGCPLSRFKDSLGNPTHILRIGESYKEKQRTIQAKKEVEQRRAGGYSRKYASKAKNLADDMVRNTARDLLYYAVTQDAMLIFANLSRGFGRQGKRTFMAERQYTRMEDWLTAKLAYEGLSKTYLSKTLAQYTSKTCSNCGFTITSADYDRVLEKLKKTATGWMTTINGKELKVEGQITYYNRYKRQNVVKDLSVELDRLSEESVNNDISSWTKGRSGEALSLLKKRFSHRPVQEKFVCLNCGFETHAAEQAALNIARSWLFLRSQEYKKYQTNKTTGNTDKRAFVETWQSFYRKKLKEVWKPAVRSGGSGGGSTSQDVVTFKDVAIYFSPEEWVRLSAGQRELYQEVMLDNYELVTSLDRESKLLYKMDPEEESCEGVPYSSADSGAPDSSSTSACTSPKKKRKV

SEQ ID NO: 21908 - protein, 1739 aa, synthetic construct
MAPKKKRKVSRVNGSGSGGGMNHDQEFDPPKVYPPVPAEKRKPIRVLSLFDGIATGLLVLKDLGIQVDRYIASEVCEDSITVGMVRHQGKIMYVGDVRSVTQKHIQEWGPFDLVIGGSPCNDLSIVNPARKGLYEGTGRLFFEFYRLLHDARPKEGDDRPFFWLFENVVAMGVSDKRDISRFLESNPVMIDAKEVSAAHRARYFWGNLPGMNRPLASTVNDKLELQECLEHGRIAKFSKVRTITTRSNSIKQGKDQHFPVFMNEKEDILWCTEMERVFGFPVHYTDVSNMSRLARQRLLGRSWSVPVIRHLFAPLKEYFACVSSGNSNANSRGPSFSSGLVPLSLRGSHMGPMEIYKTVSAWKRQPVRVLSLFRNIDKVLKSLGFLESGSGSGGGTLKYVEDVTNVVRRDVEKWGPFDLVYGSTQPLGSSCDRCPGWYMFQFHRILQYALPRQESQRPFFWIFMDNLLLTEDDQETTTRFLQTEAVTLQDVRGRDYQNAMRVWSNIPGLKSKHAPLTPKEEEYLQAQVRSRSKLDAPKVDLLVKNCLLPLREYFKYFSQNSLPLGGPSSGAPPPSGGSPAGSPTSTEEGTSESATPESGPGTSTEPSEGSAPGSPAGSPTSTEEGTSTEPSEGSAPGTSTEPSEGGSGGGSAQEIKRINKIRRRLVKDSNTKKAGKTGPMKTLLVRVMTPDLRERLENLRKKPENIPQPISNTSRANLNKLLTDYTEMKKAILHVYWEEFQKDPVGLMSRVAQPASKKIDQNKLKPEMDEKGNLTTAGFACSQCGQPLFVYKLEQVSEKGKAYTNYFGRCNVAEHEKLILLAQLKPEKDSDEAVTYSLGKFGQRALDFYSIHVTKESTHPVKPLAQIAGNRYASGPVGKALSDACMGTIASFLSKYQDIIIEHQKVVKGNQKRLESLRELAGKENLEYPSVTLPPQPHTKEGVDAYNEVIARVRMWVNLNLWQKLKLSRDDAKPLLRLKGFPSFPLVERQANEVDWWDMVCNVKKLINEKKEDGKVFWQNLAGYKRQEALRPYLSSEEDRKKGKKFARYQLGDLLLHLEKKHGEDWGKVYDEAWERIDKKVEGLSKHIKLEEERRSEDAQSKAALTDWLRAKASFVIEGLKEADKDEFCRCELKLQKWYGDLRGKPFAIEAENSILDISGFSKQYNCAFIWQKDGVKKLNLYLIINYFKGGKLRFKKIKPEAFEANRFYTVINKKSGEIVPMEVNFNFDDPNLIILPLAFGKRQGREFIWNDLLSLETGSLKLANGRVIEKTLYNRRTRQDEPALFVALTFERREVLDSSNIKPMNLIGVARGENIPAVIALTDPEGCPLSRFKDSLGNPTHILRIGESYKEKQRTIQAKKEVEQRRAGGYSRKYASKAKNLADDMVRNTARDLLYYAVTQDAMLIFANLSRGFGRQGKRTFMAERQYTRMEDWLTAKLAYEGLSKTYLSKTLAQYTSKTCSNCGFTITSADYDRVLEKLKKTATGWMTTINGKELKVEGQITYYNRYKRQNVVKDLSVELDRLSEESVNNDISSWTKGRSGEALSLLKKRFSHRPVQEKFVCLNCGFETHAAEQAALNIARSWLFLRSQEYKKYQTNKTTGNTDKRAFVETWQSFYRKKLKEVWKPAVRSGGSGGGSTSVAFRDVIVDFTQEEWQQLKPAQKDLYRDVMMEIYWNLVSLDLETEGDMNEPDPEKDSWEDRTSIVVVEGLMRNGAQGYACEKAGIQGCRVTSPKKKRKV

SEQ ID NO: 21909 - protein, 1733 aa, synthetic construct
MAPKKKRKVSRVNGSGSGGGMNHDQEFDPPKVYPPVPAEKRKPIRVLSLFDGIATGLLVLKDLGIQVDRYIASEVCEDSITVGMVRHQGKIMYVGDVRSVTQKHIQEWGPFDLVIGGSPCNDLSIVNPARKGLYEGTGRLFFEFYRLLHDARPKEGDDRPFFWLFENVVAMGVSDKRDISRFLESNPVMIDAKEVSAAHRARYFWGNLPGMNRPLASTVNDKLELQECLEHGRIAKFSKVRTITTRSNSIKQGKDQHFPVFMNEKEDILWCTEMERVFGFPVHYTDVSNMSRLARQRLLGRSWSVPVIRHLFAPLKEYFACVSSGNSNANSRGPSFSSGLVPLSLRGSHMGPMEIYKTVSAWKRQPVRVLSLFRNIDKVLKSLGFLESGSGSGGGTLKYVEDVTNVVRRDVEKWGPFDLVYGSTQPLGSSCDRCPGWYMFQFHRILQYALPRQESQRPFFWIFMDNLLLTEDDQETTTRFLQTEAVTLQDVRGRDYQNAMRVWSNIPGLKSKHAPLTPKEEEYLQAQVRSRSKLDAPKVDLLVKNCLLPLREYFKYFSQNSLPLGGPSSGAPPPSGGSPAGSPTSTEEGTSESATPESGPGTSTEPSEGSAPGSPAGSPTSTEEGTSTEPSEGSAPGTSTEPSEGGSGGGSAQEIKRINKIRRRLVKDSNTKKAGKTGPMKTLLVRVMTPDLRERLENLRKKPENIPQPISNTSRANLNKLLTDYTEMKKAILHVYWEEFQKDPVGLMSRVAQPASKKIDQNKLKPEMDEKGNLTTAGFACSQCGQPLFVYKLEQVSEKGKAYTNYFGRCNVAEHEKLILLAQLKPEKDSDEAVTYSLGKFGQRALDFYSIHVTKESTHPVKPLAQIAGNRYASGPVGKALSDACMGTIASFLSKYQDIIIEHQKVVKGNQKRLESLRELAGKENLEYPSVTLPPQPHTKEGVDAYNEVIARVRMWVNLNLWQKLKLSRDDAKPLLRLKGFPSFPLVERQANEVDWWDMVCNVKKLINEKKEDGKVFWQNLAGYKRQEALRPYLSSEEDRKKGKKFARYQLGDLLLHLEKKHGEDWGKVYDEAWERIDKKVEGLSKHIKLEEERRSEDAQSKAALTDWLRAKASFVIEGLKEADKDEFCRCELKLQKWYGDLRGKPFAIEAENSILDISGFSKQYNCAFIWQKDGVKKLNLYLIINYFKGGKLRFKKIKPEAFEANRFYTVINKKSGEIVPMEVNFNFDDPNLIILPLAFGKRQGREFIWNDLLSLETGSLKLANGRVIEKTLYNRRTRQDEPALFVALTFERREVLDSSNIKPMNLIGVARGENIPAVIALTDPEGCPLSRFKDSLGNPTHILRIGESYKEKQRTIQAKKEVEQRRAGGYSRKYASKAKNLADDMVRNTARDLLYYAVTQDAMLIFANLSRGFGRQGKRTFMAERQYTRMEDWLTAKLAYEGLSKTYLSKTLAQYTSKTCSNCGFTITSADYDRVLEKLKKTATGWMTTINGKELKVEGQITYYNRYKRQNVVKDLSVELDRLSEESVNNDISSWTKGRSGEALSLLKKRFSHRPVQEKFVCLNCGFETHAAEQAALNIARSWLFLRSQEYKKYQTNKTTGNTDKRAFVETWQSFYRKKLKEVWKPAVRSGGSGGGSTSVTYNDVHVDITQEEWALMDPSQRNLYKDVMVETYMNLTAIGYNWENLEVEEPCQNPLKHGRHERPHTGEKPYEYNQCGKAFAQPTSPKKKRKV

SEQ ID NO: 21910 - protein, 1730 aa, synthetic construct
MAPKKKRKVSRVNGSGSGGGMNHDQEFDPPKVYPPVPAEKRKPIRVLSLFDGIATGLLVLKDLGIQVDRYIASEVCEDSITVGMVRHQGKIMYVGDVRSVTQKHIQEWGPFDLVIGGSPCNDLSIVNPARKGLYEGTGRLFFEFYRLLHDARPKEGDDRPFFWLFENVVAMGVSDKRDISRFLESNPVMIDAKEVSAAHRARYFWGNLPGMNRPLASTVNDKLELQECLEHGRIAKFSKVRTITTRSNSIKQGKDQHFPVFMNEKEDILWCTEMERVFGFPVHYTDVSNMSRLARQRLLGRSWSVPVIRHLFAPLKEYFACVSSGNSNANSRGPSFSSGLVPLSLRGSHMGPMEIYKTVSAWKRQPVRVLSLFRNIDKVLKSLGFLESGSGSGGGTLKYVEDVTNVVRRDVEKWGPFDLVYGSTQPLGSSCDRCPGWYMFQFHRILQYALPRQESQRPFFWIFMDNLLLTEDDQETTTRFLQTEAVTLQDVRGRDYQNAMRVWSNIPGLKSKHAPLTPKEEEYLQAQVRSRSKLDAPKVDLLVKNCLLPLREYFKYFSQNSLPLGGPSSGAPPPSGGSPAGSPTSTEEGTSESATPESGPGTSTEPSEGSAPGSPAGSPTSTEEGTSTEPSEGSAPGTSTEPSEGGSGGGSAQEIKRINKIRRRLVKDSNTKKAGKTGPMKTLLVRVMTPDLRERLENLRKKPENIPQPISNTSRANLNKLLTDYTEMKKAILHVYWEEFQKDPVGLMSRVAQPASKKIDQNKLKPEMDEKGNLTTAGFACSQCGQPLFVYKLEQVSEKGKAYTNYFGRCNVAEHEKLILLAQLKPEKDSDEAVTYSLGKFGQRALDFYSIHVTKESTHPVKPLAQIAGNRYASGPVGKALSDACMGTIASFLSKYQDIIIEHQKVVKGNQKRLESLRELAGKENLEYPSVTLPPQPHTKEGVDAYNEVIARVRMWVNLNLWQKLKLSRDDAKPLLRLKGFPSFPLVERQANEVDWWDMVCNVKKLINEKKEDGKVFWQNLAGYKRQEALRPYLSSEEDRKKGKKFARYQLGDLLLHLEKKHGEDWGKVYDEAWERIDKKVEGLSKHIKLEEERRSEDAQSKAALTDWLRAKASFVIEGLKEADKDEFCRCELKLQKWYGDLRGKPFAIEAENSILDISGFSKQYNCAFIWQKDGVKKLNLYLIINYFKGGKLRFKKIKPEAFEANRFYTVINKKSGEIVPMEVNFNFDDPNLIILPLAFGKRQGREFIWNDLLSLETGSLKLANGRVIEKTLYNRRTRQDEPALFVALTFERREVLDSSNIKPMNLIGVARGENIPAVIALTDPEGCPLSRFKDSLGNPTHILRIGESYKEKQRTIQAKKEVEQRRAGGYSRKYASKAKNLADDMVRNTARDLLYYAVTQDAMLIFANLSRGFGRQGKRTFMAERQYTRMEDWLTAKLAYEGLSKTYLSKTLAQYTSKTCSNCGFTITSADYDRVLEKLKKTATGWMTTINGKELKVEGQITYYNRYKRQNVVKDLSVELDRLSEESVNNDISSWTKGRSGEALSLLKKRFSHRPVQEKFVCLNCGFETHAAEQAALNIARSWLFLRSQEYKKYQTNKTTGNTDKRAFVETWQSFYRKKLKEVWKPAVRSGGSGGGSTSSQESVAFEDVAVYFTTKEWAIMVPAERALYRDVMLENYEAVAFVAVPPTSKPALVSHLEQGKESCFIRPPGVLSRSDWRAGTSPKKKRKV

SEQ ID NO: 21911 - protein, 1730 aa, synthetic construct
MAPKKKRKVSRVNGSGSGGGMNHDQEFDPPKVYPPVPAEKRKPIRVLSLFDGIATGLLVLKDLGIQVDRYIASEVCEDSITVGMVRHQGKIMYVGDVRSVTQKHIQEWGPFDLVIGGSPCNDLSIVNPARKGLYEGTGRLFFEFYRLLHDARPKEGDDRPFFWLFENVVAMGVSDKRDISRFLESNPVMIDAKEVSAAHRARYFWGNLPGMNRPLASTVNDKLELQECLEHGRIAKFSKVRTITTRSNSIKQGKDQHFPVFMNEKEDILWCTEMERVFGFPVHYTDVSNMSRLARQRLLGRSWSVPVIRHLFAPLKEYFACVSSGNSNANSRGPSFSSGLVPLSLRGSHMGPMEIYKTVSAWKRQPVRVLSLFRNIDKVLKSLGFLESGSGSGGGTLKYVEDVTNVVRRDVEKWGPFDLVYGSTQPLGSSCDRCPGWYMFQFHRILQYALPRQESQRPFFWIFMDNLLLTEDDQETTTRFLQTEAVTLQDVRGRDYQNAMRVWSNIPGLKSKHAPLTPKEEEYLQAQVRSRSKLDAPKVDLLVKNCLLPLREYFKYFSQNSLPLGGPSSGAPPPSGGSPAGSPTSTEEGTSESATPESGPGTSTEPSEGSAPGSPAGSPTSTEEGTSTEPSEGSAPGTSTEPSEGGSGGGSAQEIKRINKIRRRLVKDSNTKKAGKTGPMKTLLVRVMTPDLRERLENLRKKPENIPQPISNTSRANLNKLLTDYTEMKKAILHVYWEEFQKDPVGLMSRVAQPASKKIDQNKLKPEMDEKGNLTTAGFACSQCGQPLFVYKLEQVSEKGKAYTNYFGRCNVAEHEKLILLAQLKPEKDSDEAVTYSLGKFGQRALDFYSIHVTKESTHPVKPLAQIAGNRYASGPVGKALSDACMGTIASFLSKYQDIIIEHQKVVKGNQKRLESLRELAGKENLEYPSVTLPPQPHTKEGVDAYNEVIARVRMWVNLNLWQKLKLSRDDAKPLLRLKGFPSFPLVERQANEVDWWDMVCNVKKLINEKKEDGKVFWQNLAGYKRQEALRPYLSSEEDRKKGKKFARYQLGDLLLHLEKKHGEDWGKVYDEAWERIDKKVEGLSKHIKLEEERRSEDAQSKAALTDWLRAKASFVIEGLKEADKDEFCRCELKLQKWYGDLRGKPFAIEAENSILDISGFSKQYNCAFIWQKDGVKKLNLYLIINYFKGGKLRFKKIKPEAFEANRFYTVINKKSGEIVPMEVNFNFDDPNLIILPLAFGKRQGREFIWNDLLSLETGSLKLANGRVIEKTLYNRRTRQDEPALFVALTFERREVLDSSNIKPMNLIGVARGENIPAVIALTDPEGCPLSRFKDSLGNPTHILRIGESYKEKQRTIQAKKEVEQRRAGGYSRKYASKAKNLADDMVRNTARDLLYYAVTQDAMLIFANLSRGFGRQGKRTFMAERQYTRMEDWLTAKLAYEGLSKTYLSKTLAQYTSKTCSNCGFTITSADYDRVLEKLKKTATGWMTTINGKELKVEGQITYYNRYKRQNVVKDLSVELDRLSEESVNNDISSWTKGRSGEALSLLKKRFSHRPVQEKFVCLNCGFETHAAEQAALNIARSWLFLRSQEYKKYQTNKTTGNTDKRAFVETWQSFYRKKLKEVWKPAVRSGGSGGGSTSSKAPITFGDLAIYFSQEEWEWLSPIQKDLYEDVMLENYRNLVSLGLSFRRPNVITLLEKGKAPWMVEPARRRRGPDSGSKVTSPKKKRKV

SEQ ID NO: 21912 - protein, 1730 aa, synthetic construct
MAPKKKRKVSRVNGSGSGGGMNHDQEFDPPKVYPPVPAEKRKPIRVLSLFDGIATGLLVLKDLGIQVDRYIASEVCEDSITVGMVRHQGKIMYVGDVRSVTQKHIQEWGPFDLVIGGSPCNDLSIVNPARKGLYEGTGRLFFEFYRLLHDARPKEGDDRPFFWLFENVVAMGVSDKRDISRFLESNPVMIDAKEVSAAHRARYFWGNLPGMNRPLASTVNDKLELQECLEHGRIAKFSKVRTITTRSNSIKQGKDQHFPVFMNEKEDILWCTEMERVFGFPVHYTDVSNMSRLARQRLLGRSWSVPVIRHLFAPLKEYFACVSSGNSNANSRGPSFSSGLVPLSLRGSHMGPMEIYKTVSAWKRQPVRVLSLFRNIDKVLKSLGFLESGSGSGGGTLKYVEDVTNVVRRDVEKWGPFDLVYGSTQPLGSSCDRCPGWYMFQFHRILQYALPRQESQRPFFWIFMDNLLLTEDDQETTTRFLQTEAVTLQDVRGRDYQNAMRVWSNIPGLKSKHAPLTPKEEEYLQAQVRSRSKLDAPKVDLLVKNCLLPLREYFKYFSQNSLPLGGPSSGAPPPSGGSPAGSPTSTEEGTSESATPESGPGTSTEPSEGSAPGSPAGSPTSTEEGTSTEPSEGSAPGTSTEPSEGGSGGGSAQEIKRINKIRRRLVKDSNTKKAGKTGPMKTLLVRVMTPDLRERLENLRKKPENIPQPISNTSRANLNKLLTDYTEMKKAILHVYWEEFQKDPVGLMSRVAQPASKKIDQNKLKPEMDEKGNLTTAGFACSQCGQPLFVYKLEQVSEKGKAYTNYFGRCNVAEHEKLILLAQLKPEKDSDEAVTYSLGKFGQRALDFYSIHVTKESTHPVKPLAQIAGNRYASGPVGKALSDACMGTIASFLSKYQDIIIEHQKVVKGNQKRLESLRELAGKENLEYPSVTLPPQPHTKEGVDAYNEVIARVRMWVNLNLWQKLKLSRDDAKPLLRLKGFPSFPLVERQANEVDWWDMVCNVKKLINEKKEDGKVFWQNLAGYKRQEALRPYLSSEEDRKKGKKFARYQLGDLLLHLEKKHGEDWGKVYDEAWERIDKKVEGLSKHIKLEEERRSEDAQSKAALTDWLRAKASFVIEGLKEADKDEFCRCELKLQKWYGDLRGKPFAIEAENSILDISGFSKQYNCAFIWQKDGVKKLNLYLIINYFKGGKLRFKKIKPEAFEANRFYTVINKKSGEIVPMEVNFNFDDPNLIILPLAFGKRQGREFIWNDLLSLETGSLKLANGRVIEKTLYNRRTRQDEPALFVALTFERREVLDSSNIKPMNLIGVARGENIPAVIALTDPEGCPLSRFKDSLGNPTHILRIGESYKEKQRTIQAKKEVEQRRAGGYSRKYASKAKNLADDMVRNTARDLLYYAVTQDAMLIFANLSRGFGRQGKRTFMAERQYTRMEDWLTAKLAYEGLSKTYLSKTLAQYTSKTCSNCGFTITSADYDRVLEKLKKTATGWMTTINGKELKVEGQITYYNRYKRQNVVKDLSVELDRLSEESVNNDISSWTKGRSGEALSLLKKRFSHRPVQEKFVCLNCGFETHAAEQAALNIARSWLFLRSQEYKKYQTNKTTGNTDKRAFVETWQSFYRKKLKEVWKPAVRSGGSGGGSTSEMGLLTFRDIAIEFSLEEWQCLDCAQRNLYRDVMLENYRNLVSLGIAVSKPDLITCLEQNKESQNIKRNKMVAKHPVMHSHTSPKKKRKV

SEQ ID NO: 21913 - protein, 1730 aa, synthetic construct
MAPKKKRKVSRVNGSGSGGGMNHDQEFDPPKVYPPVPAEKRKPIRVLSLFDGIATGLLVLKDLGIQVDRYIASEVCEDSITVGMVRHQGKIMYVGDVRSVTQKHIQEWGPFDLVIGGSPCNDLSIVNPARKGLYEGTGRLFFEFYRLLHDARPKEGDDRPFFWLFENVVAMGVSDKRDISRFLESNPVMIDAKEVSAAHRARYFWGNLPGMNRPLASTVNDKLELQECLEHGRIAKFSKVRTITTRSNSIKQGKDQHFPVFMNEKEDILWCTEMERVFGFPVHYTDVSNMSRLARQRLLGRSWSVPVIRHLFAPLKEYFACVSSGNSNANSRGPSFSSGLVPLSLRGSHMGPMEIYKTVSAWKRQPVRVLSLFRNIDKVLKSLGFLESGSGSGGGTLKYVEDVTNVVRRDVEKWGPFDLVYGSTQPLGSSCDRCPGWYMFQFHRILQYALPRQESQRPFFWIFMDNLLLTEDDQETTTRFLQTEAVTLQDVRGRDYQNAMRVWSNIPGLKSKHAPLTPKEEEYLQAQVRSRSKLDAPKVDLLVKNCLLPLREYFKYFSQNSLPLGGPSSGAPPPSGGSPAGSPTSTEEGTSESATPESGPGTSTEPSEGSAPGSPAGSPTSTEEGTSTEPSEGSAPGTSTEPSEGGSGGGSAQEIKRINKIRRRLVKDSNTKKAGKTGPMKTLLVRVMTPDLRERLENLRKKPENIPQPISNTSRANLNKLLTDYTEMKKAILHVYWEEFQKDPVGLMSRVAQPASKKIDQNKLKPEMDEKGNLTTAGFACSQCGQPLFVYKLEQVSEKGKAYTNYFGRCNVAEHEKLILLAQLKPEKDSDEAVTYSLGKFGQRALDFYSIHVTKESTHPVKPLAQIAGNRYASGPVGKALSDACMGTIASFLSKYQDIIIEHQKVVKGNQKRLESLRELAGKENLEYPSVTLPPQPHTKEGVDAYNEVIARVRMWVNLNLWQKLKLSRDDAKPLLRLKGFPSFPLVERQANEVDWWDMVCNVKKLINEKKEDGKVFWQNLAGYKRQEALRPYLSSEEDRKKGKKFARYQLGDLLLHLEKKHGEDWGKVYDEAWERIDKKVEGLSKHIKLEEERRSEDAQSKAALTDWLRAKASFVIEGLKEADKDEFCRCELKLQKWYGDLRGKPFAIEAENSILDISGFSKQYNCAFIWQKDGVKKLNLYLIINYFKGGKLRFKKIKPEAFEANRFYTVINKKSGEIVPMEVNFNFDDPNLIILPLAFGKRQGREFIWNDLLSLETGSLKLANGRVIEKTLYNRRTRQDEPALFVALTFERREVLDSSNIKPMNLIGVARGENIPAVIALTDPEGCPLSRFKDSLGNPTHILRIGESYKEKQRTIQAKKEVEQRRAGGYSRKYASKAKNLADDMVRNTARDLLYYAVTQDAMLIFANLSRGFGRQGKRTFMAERQYTRMEDWLTAKLAYEGLSKTYLSKTLAQYTSKTCSNCGFTITSADYDRVLEKLKKTATGWMTTINGKELKVEGQITYYNRYKRQNVVKDLSVELDRLSEESVNNDISSWTKGRSGEALSLLKKRFSHRPVQEKFVCLNCGFETHAAEQAALNIARSWLFLRSQEYKKYQTNKTTGNTDKRAFVETWQSFYRKKLKEVWKPAVRSGGSGGGSTSLLTFEDVAVSFSEEEWELLDPPQKTLYNDVMQENYETVISLGLKLKNDTGNDQPISISALEMQASGSKVLRKARMKVAQKTTSPKKKRKV

SEQ ID NO: 21914 - protein, 1856 aa, synthetic construct
MAPKKKRKVSRMERLVYEVRQKCRNIEDICISCGSLNVTLEHPLFIGGMCQNCKNCFLECAYQYDDDGYQSYCTICCGGREVLMCGNNNCCRCFCVECVDLLVGPGAAQAAIKEDPWNCYMCGHKGTYGLLRRREDWPSRLQMFFANNHDQEFDPPKVYPPVPAEKRKPIRVLSLFDGIATGLLVLKDLGIQVDRYIASEVCEDSITVGMVRHQGKIMYVGDVRSVTQKHIQEWGPFDLVIGGSPCNDLSIVNPARKGLYEGTGRLFFEFYRLLHDARPKEGDDRPFFWLFENVVAMGVSDKRDISRFLESNPVMIDAKEVSAAHRARYFWGNLPGMNRPLASTVNDKLELQECLEHGRIAKFSKVRTITTRSNSIKQGKDQHFPVFMNEKEDILWCTEMERVFGFPVHYTDVSNMSRLARQRLLGRSWSVPVIRHLFAPLKEYFACVSSGNSNANSRGPSFSSGLVPLSLRGSHMGPMEIYKTVSAWKRQPVRVLSLFRNIDKVLKSLGFLESGSGSGGGTLKYVEDVTNVVRRDVEKWGPFDLVYGSTQPLGSSCDRCPGWYMFQFHRILQYALPRQESQRPFFWIFMDNLLLTEDDQETTTRFLQTEAVTLQDVRGRDYQNAMRVWSNIPGLKSKHAPLTPKEEEYLQAQVRSRSKLDAPKVDLLVKNCLLPLREYFKYFSQNSLPLGGPSSGAPPPSGGSPAGSPTSTEEGTSESATPESGPGTSTEPSEGSAPGSPAGSPTSTEEGTSTEPSEGSAPGTSTEPSEGGSGGGSAQEIKRINKIRRRLVKDSNTKKAGKTGPMKTLLVRVMTPDLRERLENLRKKPENIPQPISNTSRANLNKLLTDYTEMKKAILHVYWEEFQKDPVGLMSRVAQPASKKIDQNKLKPEMDEKGNLTTAGFACSQCGQPLFVYKLEQVSEKGKAYTNYFGRCNVAEHEKLILLAQLKPEKDSDEAVTYSLGKFGQRALDFYSIHVTKESTHPVKPLAQIAGNRYASGPVGKALSDACMGTIASFLSKYQDIIIEHQKVVKGNQKRLESLRELAGKENLEYPSVTLPPQPHTKEGVDAYNEVIARVRMWVNLNLWQKLKLSRDDAKPLLRLKGFPSFPLVERQANEVDWWDMVCNVKKLINEKKEDGKVFWQNLAGYKRQEALRPYLSSEEDRKKGKKFARYQLGDLLLHLEKKHGEDWGKVYDEAWERIDKKVEGLSKHIKLEEERRSEDAQSKAALTDWLRAKASFVIEGLKEADKDEFCRCELKLQKWYGDLRGKPFAIEAENSILDISGFSKQYNCAFIWQKDGVKKLNLYLIINYFKGGKLRFKKIKPEAFEANRFYTVINKKSGEIVPMEVNFNFDDPNLIILPLAFGKRQGREFIWNDLLSLETGSLKLANGRVIEKTLYNRRTRQDEPALFVALTFERREVLDSSNIKPMNLIGVARGENIPAVIALTDPEGCPLSRFKDSLGNPTHILRIGESYKEKQRTIQAKKEVEQRRAGGYSRKYASKAKNLADDMVRNTARDLLYYAVTQDAMLIFANLSRGFGRQGKRTFMAERQYTRMEDWLTAKLAYEGLSKTYLSKTLAQYTSKTCSNCGFTITSADYDRVLEKLKKTATGWMTTINGKELKVEGQITYYNRYKRQNVVKDLSVELDRLSEESVNNDISSWTKGRSGEALSLLKKRFSHRPVQEKFVCLNCGFETHAAEQAALNIARSWLFLRSQEYKKYQTNKTTGNTDKRAFVETWQSFYRKKLKEVWKPAVRSGGSGGGSTSALVTFEDVAVRFTQEEWALLDPSQKILYRDVMRETYRNLTSVGINWECWDLEACFRSLGRNLRVQVVKRKCELTNSGPCAETSPKKKRKV

SEQ ID NO: 21915 - protein, 1856 aa, synthetic construct
MAPKKKRKVSRMERLVYEVRQKCRNIEDICISCGSLNVTLEHPLFIGGMCQNCKNCFLECAYQYDDDGYQSYCTICCGGREVLMCGNNNCCRCFCVECVDLLVGPGAAQAAIKEDPWNCYMCGHKGTYGLLRRREDWPSRLQMFFANNHDQEFDPPKVYPPVPAEKRKPIRVLSLFDGIATGLLVLKDLGIQVDRYIASEVCEDSITVGMVRHQGKIMYVGDVRSVTQKHIQEWGPFDLVIGGSPCNDLSIVNPARKGLYEGTGRLFFEFYRLLHDARPKEGDDRPFFWLFENVVAMGVSDKRDISRFLESNPVMIDAKEVSAAHRARYFWGNLPGMNRPLASTVNDKLELQECLEHGRIAKFSKVRTITTRSNSIKQGKDQHFPVFMNEKEDILWCTEMERVFGFPVHYTDVSNMSRLARQRLLGRSWSVPVIRHLFAPLKEYFACVSSGNSNANSRGPSFSSGLVPLSLRGSHMGPMEIYKTVSAWKRQPVRVLSLFRNIDKVLKSLGFLESGSGSGGGTLKYVEDVTNVVRRDVEKWGPFDLVYGSTQPLGSSCDRCPGWYMFQFHRILQYALPRQESQRPFFWIFMDNLLLTEDDQETTTRFLQTEAVTLQDVRGRDYQNAMRVWSNIPGLKSKHAPLTPKEEEYLQAQVRSRSKLDAPKVDLLVKNCLLPLREYFKYFSQNSLPLGGPSSGAPPPSGGSPAGSPTSTEEGTSESATPESGPGTSTEPSEGSAPGSPAGSPTSTEEGTSTEPSEGSAPGTSTEPSEGGSGGGSAQEIKRINKIRRRLVKDSNTKKAGKTGPMKTLLVRVMTPDLRERLENLRKKPENIPQPISNTSRANLNKLLTDYTEMKKAILHVYWEEFQKDPVGLMSRVAQPASKKIDQNKLKPEMDEKGNLTTAGFACSQCGQPLFVYKLEQVSEKGKAYTNYFGRCNVAEHEKLILLAQLKPEKDSDEAVTYSLGKFGQRALDFYSIHVTKESTHPVKPLAQIAGNRYASGPVGKALSDACMGTIASFLSKYQDIIIEHQKVVKGNQKRLESLRELAGKENLEYPSVTLPPQPHTKEGVDAYNEVIARVRMWVNLNLWQKLKLSRDDAKPLLRLKGFPSFPLVERQANEVDWWDMVCNVKKLINEKKEDGKVFWQNLAGYKRQEALRPYLSSEEDRKKGKKFARYQLGDLLLHLEKKHGEDWGKVYDEAWERIDKKVEGLSKHIKLEEERRSEDAQSKAALTDWLRAKASFVIEGLKEADKDEFCRCELKLQKWYGDLRGKPFAIEAENSILDISGFSKQYNCAFIWQKDGVKKLNLYLIINYFKGGKLRFKKIKPEAFEANRFYTVINKKSGEIVPMEVNFNFDDPNLIILPLAFGKRQGREFIWNDLLSLETGSLKLANGRVIEKTLYNRRTRQDEPALFVALTFERREVLDSSNIKPMNLIGVARGENIPAVIALTDPEGCPLSRFKDSLGNPTHILRIGESYKEKQRTIQAKKEVEQRRAGGYSRKYASKAKNLADDMVRNTARDLLYYAVTQDAMLIFANLSRGFGRQGKRTFMAERQYTRMEDWLTAKLAYEGLSKTYLSKTLAQYTSKTCSNCGFTITSADYDRVLEKLKKTATGWMTTINGKELKVEGQITYYNRYKRQNVVKDLSVELDRLSEESVNNDISSWTKGRSGEALSLLKKRFSHRPVQEKFVCLNCGFETHAAEQAALNIARSWLFLRSQEYKKYQTNKTTGNTDKRAFVETWQSFYRKKLKEVWKPAVRSGGSGGGSTSSTPVTFEDVVVYFTAAEWVHLTNWQRDFYQAVMMETYELVASVAGDGVPMAEDEEGGVERPVWQYIPRGKRRRKTPQPRADTSPKKKRKV

SEQ ID NO: 21916 - protein, 1856 aa, synthetic construct
MAPKKKRKVSRMERLVYEVRQKCRNIEDICISCGSLNVTLEHPLFIGGMCQNCKNCFLECAYQYDDDGYQSYCTICCGGREVLMCGNNNCCRCFCVECVDLLVGPGAAQAAIKEDPWNCYMCGHKGTYGLLRRREDWPSRLQMFFANNHDQEFDPPKVYPPVPAEKRKPIRVLSLFDGIATGLLVLKDLGIQVDRYIASEVCEDSITVGMVRHQGKIMYVGDVRSVTQKHIQEWGPFDLVIGGSPCNDLSIVNPARKGLYEGTGRLFFEFYRLLHDARPKEGDDRPFFWLFENVVAMGVSDKRDISRFLESNPVMIDAKEVSAAHRARYFWGNLPGMNRPLASTVNDKLELQECLEHGRIAKFSKVRTITTRSNSIKQGKDQHFPVFMNEKEDILWCTEMERVFGFPVHYTDVSNMSRLARQRLLGRSWSVPVIRHLFAPLKEYFACVSSGNSNANSRGPSFSSGLVPLSLRGSHMGPMEIYKTVSAWKRQPVRVLSLFRNIDKVLKSLGFLESGSGSGGGTLKYVEDVTNVVRRDVEKWGPFDLVYGSTQPLGSSCDRCPGWYMFQFHRILQYALPRQESQRPFFWIFMDNLLLTEDDQETTTRFLQTEAVTLQDVRGRDYQNAMRVWSNIPGLKSKHAPLTPKEEEYLQAQVRSRSKLDAPKVDLLVKNCLLPLREYFKYFSQNSLPLGGPSSGAPPPSGGSPAGSPTSTEEGTSESATPESGPGTSTEPSEGSAPGSPAGSPTSTEEGTSTEPSEGSAPGTSTEPSEGGSGGGSAQEIKRINKIRRRLVKDSNTKKAGKTGPMKTLLVRVMTPDLRERLENLRKKPENIPQPISNTSRANLNKLLTDYTEMKKAILHVYWEEFQKDPVGLMSRVAQPASKKIDQNKLKPEMDEKGNLTTAGFACSQCGQPLFVYKLEQVSEKGKAYTNYFGRCNVAEHEKLILLAQLKPEKDSDEAVTYSLGKFGQRALDFYSIHVTKESTHPVKPLAQIAGNRYASGPVGKALSDACMGTIASFLSKYQDIIIEHQKVVKGNQKRLESLRELAGKENLEYPSVTLPPQPHTKEGVDAYNEVIARVRMWVNLNLWQKLKLSRDDAKPLLRLKGFPSFPLVERQANEVDWWDMVCNVKKLINEKKEDGKVFWQNLAGYKRQEALRPYLSSEEDRKKGKKFARYQLGDLLLHLEKKHGEDWGKVYDEAWERIDKKVEGLSKHIKLEEERRSEDAQSKAALTDWLRAKASFVIEGLKEADKDEFCRCELKLQKWYGDLRGKPFAIEAENSILDISGFSKQYNCAFIWQKDGVKKLNLYLIINYFKGGKLRFKKIKPEAFEANRFYTVINKKSGEIVPMEVNFNFDDPNLIILPLAFGKRQGREFIWNDLLSLETGSLKLANGRVIEKTLYNRRTRQDEPALFVALTFERREVLDSSNIKPMNLIGVARGENIPAVIALTDPEGCPLSRFKDSLGNPTHILRIGESYKEKQRTIQAKKEVEQRRAGGYSRKYASKAKNLADDMVRNTARDLLYYAVTQDAMLIFANLSRGFGRQGKRTFMAERQYTRMEDWLTAKLAYEGLSKTYLSKTLAQYTSKTCSNCGFTITSADYDRVLEKLKKTATGWMTTINGKELKVEGQITYYNRYKRQNVVKDLSVELDRLSEESVNNDISSWTKGRSGEALSLLKKRFSHRPVQEKFVCLNCGFETHAAEQAALNIARSWLFLRSQEYKKYQTNKTTGNTDKRAFVETWQSFYRKKLKEVWKPAVRSGGSGGGSTSQDVVTFKDVAIYFSPEEWVRLSAGQRELYQEVMLDNYELVTSLDRESKLLYKMDPEEESCEGVPYSSADSGAPDSSSTSACTSPKKKRKV

SEQ ID NO: 21917 - protein, 1865 aa, synthetic construct
MAPKKKRKVSRMERLVYEVRQKCRNIEDICISCGSLNVTLEHPLFIGGMCQNCKNCFLECAYQYDDDGYQSYCTICCGGREVLMCGNNNCCRCFCVECVDLLVGPGAAQAAIKEDPWNCYMCGHKGTYGLLRRREDWPSRLQMFFANNHDQEFDPPKVYPPVPAEKRKPIRVLSLFDGIATGLLVLKDLGIQVDRYIASEVCEDSITVGMVRHQGKIMYVGDVRSVTQKHIQEWGPFDLVIGGSPCNDLSIVNPARKGLYEGTGRLFFEFYRLLHDARPKEGDDRPFFWLFENVVAMGVSDKRDISRFLESNPVMIDAKEVSAAHRARYFWGNLPGMNRPLASTVNDKLELQECLEHGRIAKFSKVRTITTRSNSIKQGKDQHFPVFMNEKEDILWCTEMERVFGFPVHYTDVSNMSRLARQRLLGRSWSVPVIRHLFAPLKEYFACVSSGNSNANSRGPSFSSGLVPLSLRGSHMGPMEIYKTVSAWKRQPVRVLSLFRNIDKVLKSLGFLESGSGSGGGTLKYVEDVTNVVRRDVEKWGPFDLVYGSTQPLGSSCDRCPGWYMFQFHRILQYALPRQESQRPFFWIFMDNLLLTEDDQETTTRFLQTEAVTLQDVRGRDYQNAMRVWSNIPGLKSKHAPLTPKEEEYLQAQVRSRSKLDAPKVDLLVKNCLLPLREYFKYFSQNSLPLGGPSSGAPPPSGGSPAGSPTSTEEGTSESATPESGPGTSTEPSEGSAPGSPAGSPTSTEEGTSTEPSEGSAPGTSTEPSEGGSGGGSAQEIKRINKIRRRLVKDSNTKKAGKTGPMKTLLVRVMTPDLRERLENLRKKPENIPQPISNTSRANLNKLLTDYTEMKKAILHVYWEEFQKDPVGLMSRVAQPASKKIDQNKLKPEMDEKGNLTTAGFACSQCGQPLFVYKLEQVSEKGKAYTNYFGRCNVAEHEKLILLAQLKPEKDSDEAVTYSLGKFGQRALDFYSIHVTKESTHPVKPLAQIAGNRYASGPVGKALSDACMGTIASFLSKYQDIIIEHQKVVKGNQKRLESLRELAGKENLEYPSVTLPPQPHTKEGVDAYNEVIARVRMWVNLNLWQKLKLSRDDAKPLLRLKGFPSFPLVERQANEVDWWDMVCNVKKLINEKKEDGKVFWQNLAGYKRQEALRPYLSSEEDRKKGKKFARYQLGDLLLHLEKKHGEDWGKVYDEAWERIDKKVEGLSKHIKLEEERRSEDAQSKAALTDWLRAKASFVIEGLKEADKDEFCRCELKLQKWYGDLRGKPFAIEAENSILDISGFSKQYNCAFIWQKDGVKKLNLYLIINYFKGGKLRFKKIKPEAFEANRFYTVINKKSGEIVPMEVNFNFDDPNLIILPLAFGKRQGREFIWNDLLSLETGSLKLANGRVIEKTLYNRRTRQDEPALFVALTFERREVLDSSNIKPMNLIGVARGENIPAVIALTDPEGCPLSRFKDSLGNPTHILRIGESYKEKQRTIQAKKEVEQRRAGGYSRKYASKAKNLADDMVRNTARDLLYYAVTQDAMLIFANLSRGFGRQGKRTFMAERQYTRMEDWLTAKLAYEGLSKTYLSKTLAQYTSKTCSNCGFTITSADYDRVLEKLKKTATGWMTTINGKELKVEGQITYYNRYKRQNVVKDLSVELDRLSEESVNNDISSWTKGRSGEALSLLKKRFSHRPVQEKFVCLNCGFETHAAEQAALNIARSWLFLRSQEYKKYQTNKTTGNTDKRAFVETWQSFYRKKLKEVWKPAVRSGGSGGGSTSVAFRDVIVDFTQEEWQQLKPAQKDLYRDVMMEIYWNLVSLDLETEGDMNEPDPEKDSWEDRTSIVVVEGLMRNGAQGYACEKAGIQGCRVTSPKKKRKV

SEQ ID NO: 21918 - protein, 1859 aa, synthetic construct
MAPKKKRKVSRMERLVYEVRQKCRNIEDICISCGSLNVTLEHPLFIGGMCQNCKNCFLECAYQYDDDGYQSYCTICCGGREVLMCGNNNCCRCFCVECVDLLVGPGAAQAAIKEDPWNCYMCGHKGTYGLLRRREDWPSRLQMFFANNHDQEFDPPKVYPPVPAEKRKPIRVLSLFDGIATGLLVLKDLGIQVDRYIASEVCEDSITVGMVRHQGKIMYVGDVRSVTQKHIQEWGPFDLVIGGSPCNDLSIVNPARKGLYEGTGRLFFEFYRLLHDARPKEGDDRPFFWLFENVVAMGVSDKRDISRFLESNPVMIDAKEVSAAHRARYFWGNLPGMNRPLASTVNDKLELQECLEHGRIAKFSKVRTITTRSNSIKQGKDQHFPVFMNEKEDILWCTEMERVFGFPVHYTDVSNMSRLARQRLLGRSWSVPVIRHLFAPLKEYFACVSSGNSNANSRGPSFSSGLVPLSLRGSHMGPMEIYKTVSAWKRQPVRVLSLFRNIDKVLKSLGFLESGSGSGGGTLKYVEDVTNVVRRDVEKWGPFDLVYGSTQPLGSSCDRCPGWYMFQFHRILQYALPRQESQRPFFWIFMDNLLLTEDDQETTTRFLQTEAVTLQDVRGRDYQNAMRVWSNIPGLKSKHAPLTPKEEEYLQAQVRSRSKLDAPKVDLLVKNCLLPLREYFKYFSQNSLPLGGPSSGAPPPSGGSPAGSPTSTEEGTSESATPESGPGTSTEPSEGSAPGSPAGSPTSTEEGTSTEPSEGSAPGTSTEPSEGGSGGGSAQEIKRINKIRRRLVKDSNTKKAGKTGPMKTLLVRVMTPDLRERLENLRKKPENIPQPISNTSRANLNKLLTDYTEMKKAILHVYWEEFQKDPVGLMSRVAQPASKKIDQNKLKPEMDEKGNLTTAGFACSQCGQPLFVYKLEQVSEKGKAYTNYFGRCNVAEHEKLILLAQLKPEKDSDEAVTYSLGKFGQRALDFYSIHVTKESTHPVKPLAQIAGNRYASGPVGKALSDACMGTIASFLSKYQDIIIEHQKVVKGNQKRLESLRELAGKENLEYPSVTLPPQPHTKEGVDAYNEVIARVRMWVNLNLWQKLKLSRDDAKPLLRLKGFPSFPLVERQANEVDWWDMVCNVKKLINEKKEDGKVFWQNLAGYKRQEALRPYLSSEEDRKKGKKFARYQLGDLLLHLEKKHGEDWGKVYDEAWERIDKKVEGLSKHIKLEEERRSEDAQSKAALTDWLRAKASFVIEGLKEADKDEFCRCELKLQKWYGDLRGKPFAIEAENSILDISGFSKQYNCAFIWQKDGVKKLNLYLIINYFKGGKLRFKKIKPEAFEANRFYTVINKKSGEIVPMEVNFNFDDPNLIILPLAFGKRQGREFIWNDLLSLETGSLKLANGRVIEKTLYNRRTRQDEPALFVALTFERREVLDSSNIKPMNLIGVARGENIPAVIALTDPEGCPLSRFKDSLGNPTHILRIGESYKEKQRTIQAKKEVEQRRAGGYSRKYASKAKNLADDMVRNTARDLLYYAVTQDAMLIFANLSRGFGRQGKRTFMAERQYTRMEDWLTAKLAYEGLSKTYLSKTLAQYTSKTCSNCGFTITSADYDRVLEKLKKTATGWMTTINGKELKVEGQITYYNRYKRQNVVKDLSVELDRLSEESVNNDISSWTKGRSGEALSLLKKRFSHRPVQEKFVCLNCGFETHAAEQAALNIARSWLFLRSQEYKKYQTNKTTGNTDKRAFVETWQSFYRKKLKEVWKPAVRSGGSGGGSTSVTYNDVHVDITQEEWALMDPSQRNLYKDVMVETYMNLTAIGYNWENLEVEEPCQNPLKHGRHERPHTGEKPYEYNQCGKAFAQPTSPKKKRKV

SEQ ID NO: 21919 - protein, 1856 aa, synthetic construct
MAPKKKRKVSRMERLVYEVRQKCRNIEDICISCGSLNVTLEHPLFIGGMCQNCKNCFLECAYQYDDDGYQSYCTICCGGREVLMCGNNNCCRCFCVECVDLLVGPGAAQAAIKEDPWNCYMCGHKGTYGLLRRREDWPSRLQMFFANNHDQEFDPPKVYPPVPAEKRKPIRVLSLFDGIATGLLVLKDLGIQVDRYIASEVCEDSITVGMVRHQGKIMYVGDVRSVTQKHIQEWGPFDLVIGGSPCNDLSIVNPARKGLYEGTGRLFFEFYRLLHDARPKEGDDRPFFWLFENVVAMGVSDKRDISRFLESNPVMIDAKEVSAAHRARYFWGNLPGMNRPLASTVNDKLELQECLEHGRIAKFSKVRTITTRSNSIKQGKDQHFPVFMNEKEDILWCTEMERVFGFPVHYTDVSNMSRLARQRLLGRSWSVPVIRHLFAPLKEYFACVSSGNSNANSRGPSFSSGLVPLSLRGSHMGPMEIYKTVSAWKRQPVRVLSLFRNIDKVLKSLGFLESGSGSGGGTLKYVEDVTNVVRRDVEKWGPFDLVYGSTQPLGSSCDRCPGWYMFQFHRILQYALPRQESQRPFFWIFMDNLLLTEDDQETTTRFLQTEAVTLQDVRGRDYQNAMRVWSNIPGLKSKHAPLTPKEEEYLQAQVRSRSKLDAPKVDLLVKNCLLPLREYFKYFSQNSLPLGGPSSGAPPPSGGSPAGSPTSTEEGTSESATPESGPGTSTEPSEGSAPGSPAGSPTSTEEGTSTEPSEGSAPGTSTEPSEGGSGGGSAQEIKRINKIRRRLVKDSNTKKAGKTGPMKTLLVRVMTPDLRERLENLRKKPENIPQPISNTSRANLNKLLTDYTEMKKAILHVYWEEFQKDPVGLMSRVAQPASKKIDQNKLKPEMDEKGNLTTAGFACSQCGQPLFVYKLEQVSEKGKAYTNYFGRCNVAEHEKLILLAQLKPEKDSDEAVTYSLGKFGQRALDFYSIHVTKESTHPVKPLAQIAGNRYASGPVGKALSDACMGTIASFLSKYQDIIIEHQKVVKGNQKRLESLRELAGKENLEYPSVTLPPQPHTKEGVDAYNEVIARVRMWVNLNLWQKLKLSRDDAKPLLRLKGFPSFPLVERQANEVDWWDMVCNVKKLINEKKEDGKVFWQNLAGYKRQEALRPYLSSEEDRKKGKKFARYQLGDLLLHLEKKHGEDWGKVYDEAWERIDKKVEGLSKHIKLEEERRSEDAQSKAALTDWLRAKASFVIEGLKEADKDEFCRCELKLQKWYGDLRGKPFAIEAENSILDISGFSKQYNCAFIWQKDGVKKLNLYLIINYFKGGKLRFKKIKPEAFEANRFYTVINKKSGEIVPMEVNFNFDDPNLIILPLAFGKRQGREFIWNDLLSLETGSLKLANGRVIEKTLYNRRTRQDEPALFVALTFERREVLDSSNIKPMNLIGVARGENIPAVIALTDPEGCPLSRFKDSLGNPTHILRIGESYKEKQRTIQAKKEVEQRRAGGYSRKYASKAKNLADDMVRNTARDLLYYAVTQDAMLIFANLSRGFGRQGKRTFMAERQYTRMEDWLTAKLAYEGLSKTYLSKTLAQYTSKTCSNCGFTITSADYDRVLEKLKKTATGWMTTINGKELKVEGQITYYNRYKRQNVVKDLSVELDRLSEESVNNDISSWTKGRSGEALSLLKKRFSHRPVQEKFVCLNCGFETHAAEQAALNIARSWLFLRSQEYKKYQTNKTTGNTDKRAFVETWQSFYRKKLKEVWKPAVRSGGSGGGSTSSQESVAFEDVAVYFTTKEWAIMVPAERALYRDVMLENYEAVAFVAVPPTSKPALVSHLEQGKESCFIRPPGVLSRSDWRAGTSPKKKRKV

SEQ ID NO: 21920 - protein, 1856 aa, synthetic construct
MAPKKKRKVSRMERLVYEVRQKCRNIEDICISCGSLNVTLEHPLFIGGMCQNCKNCFLECAYQYDDDGYQSYCTICCGGREVLMCGNNNCCRCFCVECVDLLVGPGAAQAAIKEDPWNCYMCGHKGTYGLLRRREDWPSRLQMFFANNHDQEFDPPKVYPPVPAEKRKPIRVLSLFDGIATGLLVLKDLGIQVDRYIASEVCEDSITVGMVRHQGKIMYVGDVRSVTQKHIQEWGPFDLVIGGSPCNDLSIVNPARKGLYEGTGRLFFEFYRLLHDARPKEGDDRPFFWLFENVVAMGVSDKRDISRFLESNPVMIDAKEVSAAHRARYFWGNLPGMNRPLASTVNDKLELQECLEHGRIAKFSKVRTITTRSNSIKQGKDQHFPVFMNEKEDILWCTEMERVFGFPVHYTDVSNMSRLARQRLLGRSWSVPVIRHLFAPLKEYFACVSSGNSNANSRGPSFSSGLVPLSLRGSHMGPMEIYKTVSAWKRQPVRVLSLFRNIDKVLKSLGFLESGSGSGGGTLKYVEDVTNVVRRDVEKWGPFDLVYGSTQPLGSSCDRCPGWYMFQFHRILQYALPRQESQRPFFWIFMDNLLLTEDDQETTTRFLQTEAVTLQDVRGRDYQNAMRVWSNIPGLKSKHAPLTPKEEEYLQAQVRSRSKLDAPKVDLLVKNCLLPLREYFKYFSQNSLPLGGPSSGAPPPSGGSPAGSPTSTEEGTSESATPESGPGTSTEPSEGSAPGSPAGSPTSTEEGTSTEPSEGSAPGTSTEPSEGGSGGGSAQEIKRINKIRRRLVKDSNTKKAGKTGPMKTLLVRVMTPDLRERLENLRKKPENIPQPISNTSRANLNKLLTDYTEMKKAILHVYWEEFQKDPVGLMSRVAQPASKKIDQNKLKPEMDEKGNLTTAGFACSQCGQPLFVYKLEQVSEKGKAYTNYFGRCNVAEHEKLILLAQLKPEKDSDEAVTYSLGKFGQRALDFYSIHVTKESTHPVKPLAQIAGNRYASGPVGKALSDACMGTIASFLSKYQDIIIEHQKVVKGNQKRLESLRELAGKENLEYPSVTLPPQPHTKEGVDAYNEVIARVRMWVNLNLWQKLKLSRDDAKPLLRLKGFPSFPLVERQANEVDWWDMVCNVKKLINEKKEDGKVFWQNLAGYKRQEALRPYLSSEEDRKKGKKFARYQLGDLLLHLEKKHGEDWGKVYDEAWERIDKKVEGLSKHIKLEEERRSEDAQSKAALTDWLRAKASFVIEGLKEADKDEFCRCELKLQKWYGDLRGKPFAIEAENSILDISGFSKQYNCAFIWQKDGVKKLNLYLIINYFKGGKLRFKKIKPEAFEANRFYTVINKKSGEIVPMEVNFNFDDPNLIILPLAFGKRQGREFIWNDLLSLETGSLKLANGRVIEKTLYNRRTRQDEPALFVALTFERREVLDSSNIKPMNLIGVARGENIPAVIALTDPEGCPLSRFKDSLGNPTHILRIGESYKEKQRTIQAKKEVEQRRAGGYSRKYASKAKNLADDMVRNTARDLLYYAVTQDAMLIFANLSRGFGRQGKRTFMAERQYTRMEDWLTAKLAYEGLSKTYLSKTLAQYTSKTCSNCGFTITSADYDRVLEKLKKTATGWMTTINGKELKVEGQITYYNRYKRQNVVKDLSVELDRLSEESVNNDISSWTKGRSGEALSLLKKRFSHRPVQEKFVCLNCGFETHAAEQAALNIARSWLFLRSQEYKKYQTNKTTGNTDKRAFVETWQSFYRKKLKEVWKPAVRSGGSGGGSTSSKAPITFGDLAIYFSQEEWEWLSPIQKDLYEDVMLENYRNLVSLGLSFRRPNVITLLEKGKAPWMVEPARRRRGPDSGSKVTSPKKKRKV

SEQ ID NO: 21921 - protein, 1856 aa, synthetic construct
MAPKKKRKVSRMERLVYEVRQKCRNIEDICISCGSLNVTLEHPLFIGGMCQNCKNCFLECAYQYDDDGYQSYCTICCGGREVLMCGNNNCCRCFCVECVDLLVGPGAAQAAIKEDPWNCYMCGHKGTYGLLRRREDWPSRLQMFFANNHDQEFDPPKVYPPVPAEKRKPIRVLSLFDGIATGLLVLKDLGIQVDRYIASEVCEDSITVGMVRHQGKIMYVGDVRSVTQKHIQEWGPFDLVIGGSPCNDLSIVNPARKGLYEGTGRLFFEFYRLLHDARPKEGDDRPFFWLFENVVAMGVSDKRDISRFLESNPVMIDAKEVSAAHRARYFWGNLPGMNRPLASTVNDKLELQECLEHGRIAKFSKVRTITTRSNSIKQGKDQHFPVFMNEKEDILWCTEMERVFGFPVHYTDVSNMSRLARQRLLGRSWSVPVIRHLFAPLKEYFACVSSGNSNANSRGPSFSSGLVPLSLRGSHMGPMEIYKTVSAWKRQPVRVLSLFRNIDKVLKSLGFLESGSGSGGGTLKYVEDVTNVVRRDVEKWGPFDLVYGSTQPLGSSCDRCPGWYMFQFHRILQYALPRQESQRPFFWIFMDNLLLTEDDQETTTRFLQTEAVTLQDVRGRDYQNAMRVWSNIPGLKSKHAPLTPKEEEYLQAQVRSRSKLDAPKVDLLVKNCLLPLREYFKYFSQNSLPLGGPSSGAPPPSGGSPAGSPTSTEEGTSESATPESGPGTSTEPSEGSAPGSPAGSPTSTEEGTSTEPSEGSAPGTSTEPSEGGSGGGSAQEIKRINKIRRRLVKDSNTKKAGKTGPMKTLLVRVMTPDLRERLENLRKKPENIPQPISNTSRANLNKLLTDYTEMKKAILHVYWEEFQKDPVGLMSRVAQPASKKIDQNKLKPEMDEKGNLTTAGFACSQCGQPLFVYKLEQVSEKGKAYTNYFGRCNVAEHEKLILLAQLKPEKDSDEAVTYSLGKFGQRALDFYSIHVTKESTHPVKPLAQIAGNRYASGPVGKALSDACMGTIASFLSKYQDIIIEHQKVVKGNQKRLESLRELAGKENLEYPSVTLPPQPHTKEGVDAYNEVIARVRMWVNLNLWQKLKLSRDDAKPLLRLKGFPSFPLVERQANEVDWWDMVCNVKKLINEKKEDGKVFWQNLAGYKRQEALRPYLSSEEDRKKGKKFARYQLGDLLLHLEKKHGEDWGKVYDEAWERIDKKVEGLSKHIKLEEERRSEDAQSKAALTDWLRAKASFVIEGLKEADKDEFCRCELKLQKWYGDLRGKPFAIEAENSILDISGFSKQYNCAFIWQKDGVKKLNLYLIINYFKGGKLRFKKIKPEAFEANRFYTVINKKSGEIVPMEVNFNFDDPNLIILPLAFGKRQGREFIWNDLLSLETGSLKLANGRVIEKTLYNRRTRQDEPALFVALTFERREVLDSSNIKPMNLIGVARGENIPAVIALTDPEGCPLSRFKDSLGNPTHILRIGESYKEKQRTIQAKKEVEQRRAGGYSRKYASKAKNLADDMVRNTARDLLYYAVTQDAMLIFANLSRGFGRQGKRTFMAERQYTRMEDWLTAKLAYEGLSKTYLSKTLAQYTSKTCSNCGFTITSADYDRVLEKLKKTATGWMTTINGKELKVEGQITYYNRYKRQNVVKDLSVELDRLSEESVNNDISSWTKGRSGEALSLLKKRFSHRPVQEKFVCLNCGFETHAAEQAALNIARSWLFLRSQEYKKYQTNKTTGNTDKRAFVETWQSFYRKKLKEVWKPAVRSGGSGGGSTSEMGLLTFRDIAIEFSLEEWQCLDCAQRNLYRDVMLENYRNLVSLGIAVSKPDLITCLEQNKESQNIKRNKMVAKHPVMHSHTSPKKKRKV

SEQ ID NO: 21922 - protein, 1856 aa, synthetic construct
MAPKKKRKVSRMERLVYEVRQKCRNIEDICISCGSLNVTLEHPLFIGGMCQNCKNCFLECAYQYDDDGYQSYCTICCGGREVLMCGNNNCCRCFCVECVDLLVGPGAAQAAIKEDPWNCYMCGHKGTYGLLRRREDWPSRLQMFFANNHDQEFDPPKVYPPVPAEKRKPIRVLSLFDGIATGLLVLKDLGIQVDRYIASEVCEDSITVGMVRHQGKIMYVGDVRSVTQKHIQEWGPFDLVIGGSPCNDLSIVNPARKGLYEGTGRLFFEFYRLLHDARPKEGDDRPFFWLFENVVAMGVSDKRDISRFLESNPVMIDAKEVSAAHRARYFWGNLPGMNRPLASTVNDKLELQECLEHGRIAKFSKVRTITTRSNSIKQGKDQHFPVFMNEKEDILWCTEMERVFGFPVHYTDVSNMSRLARQRLLGRSWSVPVIRHLFAPLKEYFACVSSGNSNANSRGPSFSSGLVPLSLRGSHMGPMEIYKTVSAWKRQPVRVLSLFRNIDKVLKSLGFLESGSGSGGGTLKYVEDVTNVVRRDVEKWGPFDLVYGSTQPLGSSCDRCPGWYMFQFHRILQYALPRQESQRPFFWIFMDNLLLTEDDQETTTRFLQTEAVTLQDVRGRDYQNAMRVWSNIPGLKSKHAPLTPKEEEYLQAQVRSRSKLDAPKVDLLVKNCLLPLREYFKYFSQNSLPLGGPSSGAPPPSGGSPAGSPTSTEEGTSESATPESGPGTSTEPSEGSAPGSPAGSPTSTEEGTSTEPSEGSAPGTSTEPSEGGSGGGSAQEIKRINKIRRRLVKDSNTKKAGKTGPMKTLLVRVMTPDLRERLENLRKKPENIPQPISNTSRANLNKLLTDYTEMKKAILHVYWEEFQKDPVGLMSRVAQPASKKIDQNKLKPEMDEKGNLTTAGFACSQCGQPLFVYKLEQVSEKGKAYTNYFGRCNVAEHEKLILLAQLKPEKDSDEAVTYSLGKFGQRALDFYSIHVTKESTHPVKPLAQIAGNRYASGPVGKALSDACMGTIASFLSKYQDIIIEHQKVVKGNQKRLESLRELAGKENLEYPSVTLPPQPHTKEGVDAYNEVIARVRMWVNLNLWQKLKLSRDDAKPLLRLKGFPSFPLVERQANEVDWWDMVCNVKKLINEKKEDGKVFWQNLAGYKRQEALRPYLSSEEDRKKGKKFARYQLGDLLLHLEKKHGEDWGKVYDEAWERIDKKVEGLSKHIKLEEERRSEDAQSKAALTDWLRAKASFVIEGLKEADKDEFCRCELKLQKWYGDLRGKPFAIEAENSILDISGFSKQYNCAFIWQKDGVKKLNLYLIINYFKGGKLRFKKIKPEAFEANRFYTVINKKSGEIVPMEVNFNFDDPNLIILPLAFGKRQGREFIWNDLLSLETGSLKLANGRVIEKTLYNRRTRQDEPALFVALTFERREVLDSSNIKPMNLIGVARGENIPAVIALTDPEGCPLSRFKDSLGNPTHILRIGESYKEKQRTIQAKKEVEQRRAGGYSRKYASKAKNLADDMVRNTARDLLYYAVTQDAMLIFANLSRGFGRQGKRTFMAERQYTRMEDWLTAKLAYEGLSKTYLSKTLAQYTSKTCSNCGFTITSADYDRVLEKLKKTATGWMTTINGKELKVEGQITYYNRYKRQNVVKDLSVELDRLSEESVNNDISSWTKGRSGEALSLLKKRFSHRPVQEKFVCLNCGFETHAAEQAALNIARSWLFLRSQEYKKYQTNKTTGNTDKRAFVETWQSFYRKKLKEVWKPAVRSGGSGGGSTSLLTFEDVAVSFSEEEWELLDPPQKTLYNDVMQENYETVISLGLKLKNDTGNDQPISISALEMQASGSKVLRKARMKVAQKTTSPKKKRKV
